(19) United States
(12) Patent Application Publication
(10) Pub. No.: US 2024/0269308 A1
(43) Pub. Date: Aug. 15, 2024

(54) PRODRUGS OF TOPOISOMERASE I INHIBITOR FOR ADC CONJUGATIONS AND METHODS OF USE THEREOF

(71) Applicant: Regeneron Pharmaceuticals, Inc., Tarrytown, NY (US)

(72) Inventor: Amy HAN, Hockessin, DE (US)

(73) Assignee: Regeneron Pharmaceuticals, Inc., Tarrytown, NY (US)

(21) Appl. No.: 18/393,062

(22) Filed: Dec. 21, 2023

Related U.S. Application Data
(60) Provisional application No. 63/434,230, filed on Dec. 21, 2022.
(60) Provisional application No. 63/472,064, filed on Jun. 9, 2023.

(51) Int. Cl. A61K 47/68; A61P 35/00

(52) U.S. Cl. CPC A61K 47/68037; A61K 47/6889; A61P 35/00

(57) ABSTRACT

Described herein are protein-drug conjugates and compositions thereof that are useful, for example, for target-specific delivery of therapeutic moieties, e.g., camptothecin analogs and/or derivatives. In certain embodiments, provided are specific and efficient methods for producing protein-drug constructs (e.g., antibody-drug conjugates) utilizing a combination of transglutaminase and 1,3-cycloaddition techniques. Camptothecin analogs, antibody-drug conjugates, and compositions which comprise glutaminyl-modified antibodies and camptothecin analog payloads and are provided.

### CROSS REFERENCE TO RELATED APPLICATION

[0001] This patent application claims the benefit of U.S. Provisional Application No. 63/472,064, filed on Jun. 9, 2023, and 63/434,230, filed on Dec. 21, 2022, the disclosure of each of which is incorporated by reference herein in its entirety.

### FIELD OF THE DISCLOSURE

[0002] The present disclosure relates to protein-drug conjugates (e.g., antibody-drug conjugates), pharmaceutical compositions, and methods of treating disease therewith. Also provided are specific and efficient methods for producing protein-drug constructs utilizing a combination of transglutaminase and 1,3-cycloaddition techniques. More specifically, the present disclosure relates to prodrugs of topoisomerase I inhibitor for ADC conjugations and methods of use thereof.

### SEQUENCE LISTING

[0003] The instant application contains a Sequence Listing which has been submitted electronically in XML file format and is hereby incorporated by reference in its entirety. Said XML copy, created on Dec. 21, 2023, is named 250298_000607_SL.xml and is 2,619,378 bytes in size.

### BACKGROUND OF THE DISCLOSURE

[0004] Proliferative diseases are characterized by uncontrolled growth and spread of abnormal cells. If the spread is not controlled, it can result in death. Abnormal proliferation, for example, cancer, is caused by both external factors (e.g., tobacco, chemicals, radiation and infectious organisms) and internal factors (inherited mutations, immune system conditions, the mutations that occur from metabolism). These causal factors may act together or in sequence to initiate or promote abnormal proliferation. Cancer is treated by surgery, radiation, chemotherapy, hormones and immunotherapy. However, there is a need for more effective anti-proliferation drugs.

[0005] The ideal anti-proliferation therapy would enable targeted delivery of highly cytotoxic agents to tumor cells and would leave normal cells unaffected. Conventional chemotherapeutic treatment is limited because of the toxic side-effects that arise from effects of the drug on non-cancerous cells. Various approaches to targeted drug delivery have been tried, including the use of conjugates of tumor targeted probes (such as antibodies or growth factors) with toxins such as pseudomonas or diphtheria toxins, which arrest the synthesis of proteins and cells. However, the side effects include reaction of the immune system due to non-human components of the conjugates. Further, the half-life of the drug conjugates was limited due to elimination from the circulation through renal filtration, and schematic degradation, uptake by the reticuloendothelial system (RES), and accumulation in non-targeted organs and tissues.

[0006] Another approach uses passive drug carriers such as polymers, liposomes, and polymeric micelles to take advantage of the hyper-permeability of vascular endothelia of tumor tissue. Polymeric drugs and macromolecules accumulate within solid tumors due to an enhanced permeability and retention mechanism. However, barriers of using such targeted deliveries include fast clearance of foreign particles from the blood, and technological hindrances in obtaining highly standardized, pharmaceutically acceptable drug delivery systems with the necessary specificity and selectivity for binding tumor cells.

[0007] Protein conjugates, such as antibody conjugates, utilize the selective binding of a binding agent to deliver a payload to targets within tissues of subjects. The payload can be a therapeutic moiety that is capable of taking action at the target.

[0008] Several techniques for conjugating linkers and payloads to antibodies are available. Many conjugates are prepared by non-selective covalent linkage to cysteine or lysine residues in the antibody. This non-selective technique can result in a heterogeneous mixture of products with conjugations at different sites and with different numbers of conjugations per antibody. Thus, there is a need in the art for methods and techniques that provide site-selective antibody conjugation.

[0009] There is a need in the art for additional safe and effective anti-tumor targeting agents that can bind to various antigens to provide enhanced the treatment of diseases such as cancer for use in monotherapy and combination therapies. In certain embodiments, the present disclosure meets the needs and provides other advantages.

[0010] The foregoing discussion is presented solely to provide a better understanding of the nature of the problems confronting the art and should not be construed in any way as an admission as to prior art nor should the citation of any reference herein be construed as an admission that such reference constitutes “prior art” to the instant application.

### SUMMARY OF THE DISCLOSURE

[0011] Various non-limiting aspects and embodiments of the disclosure are described below.

[0012] In one aspect, the present disclosure provides an antibody-drug conjugate comprising an antibody or an antigen-binding fragment thereof conjugated to a compound having Formula (I)

[chemical structure]

or a pharmaceutically acceptable salt thereof,
[0013] wherein R¹, R², R³, and R⁴ are independently hydrogen, a C₁₋₅ alkyl, or aryl;
[0014] AA is a natural or a nonnatural amino acid;
[0015] p is an integer from 1 to 6, and

[chemical structure]

indicates the point of attachment to the antibody or the antigen-binding fragment thereof, directly or via a linker.

[0016] In one embodiment, said compound of Formula (I) comprises

[chemical structure]

[chemical structure]

[0017] In one embodiment, said antibody or said antigen-binding fragment thereof is conjugated to a compound having a structure according to Formula (II)

[chemical structure]

[0018] or a pharmaceutically acceptable salt thereof, wherein R¹, R², R³, and R⁴ are independently hydrogen or a C₁₋₅ alkyl;
[0019] A is a Click chemistry adduct;
[0020] W is NH, O, CO, CH₂, a phenyl, or a combination of two or more thereof;
[0021] AA is a natural or a nonnatural amino acid;
[0022] m is an integer from 0 to 8;
[0023] n is 0 or 1;
[0024] p is an integer from 1 to 6, and

[chemical structure]

[0025] indicates the point of attachment to the antibody or the antigen-binding fragment thereof, directly or via a linker.

[0026] In one embodiment, the click chemistry adduct is a product of a copper-free click chemistry reaction selected from: (a) strain-promoted azide/dibenzocyclooctyne-amine (DBCO) click chemistry; (b) inverse electron demand Diels-Alder (IED-DA) tetrazine/trans-cyclooctene (TCO) click chemistry; (c) inverse electron demand Diels-Alder (IED-DA) tetrazine/norbonene click chemistry; (d) Diels-Alder maleimide/furan click-chemistry; (e) Staudinger ligation; and (f) nitrile-oxide/norbonene cycloaddition click chemistry.

[0027] In one embodiment, the click chemistry adduct comprises a triazole or a diazine.

[0028] In one embodiment, the click chemistry adduct is selected from the group consisting of:

[chemical structure]

[chemical structure]

and any regio-isomers or entantiomers thereof, where R′ is H or a C₁₋₃ alkyl and Z is C or N.

[0029] In one embodiment, AA comprises a natural amino acid selected from glycine, alanine, valine, leucine, isoleucine, phenylalanine, tyrosine, threonine, lysine, asparagine, glutamine, aspartic acid, and glutamic acid.

[0030] In one embodiment, AA comprises a nonnatural amino acid selected from the group consisting of an R-amino acid, an N-methyl amino acid,

[chemical structure]

[0031] In one embodiment, said compound of Formula (II) comprises

[chemical structure]

[chemical structure]

[chemical structure]

[chemical structure]

[chemical structure]

[0032] In one embodiment, said compound of Formula (II) comprises

[chemical structure]

[0033] In another aspect, the present disclosure provides an antibody-drug conjugate having a structure according to Formula (III)

[chemical structure]

[0034] or a pharmaceutically acceptable salt thereof, wherein
[0035] Ab is an antibody or an antigen-binding fragment thereof;
[0036] R¹, R², R³, and R⁴ are independently hydrogen or a C₁₋₅ alkyl;
[0037] A is a Click chemistry adduct;
[0038] LL is a linker or a bond connecting said Ab and said A;
[0039] AA is a natural or a nonnatural amino acid;
[0040] m is an integer from 0 to 8;
[0041] n is 0 or 1;
[0042] p is an integer from 1 to 6;
[0043] and q is an integer from 1 to 10.

[0044] In another aspect, the present disclosure provides an antibody-drug conjugate having a structure according to Formula (IVa or IVb)

[chemical structure]

[chemical structure]

[0045] or a pharmaceutically acceptable salt thereof, wherein
[0046] Ab is an antibody or an antigen-binding fragment thereof;
[0047] R is a side chain of any natural or nonnatural amino acid;
[0048] and n is an integer from 1 to 5.

[0049] In another aspect, the present disclosure provides an antibody-drug conjugate having a structure according to Formula (IVc, IVd, IVe, IVf, IVg, IVh, IVi, IVj, or IVk)

[chemical structure]

[chemical structure]

[chemical structure]

[0050] or a pharmaceutically acceptable salt thereof, wherein
[0051] Ab is an antibody or an antigen-binding fragment thereof;
[0052] R is a side chain of any natural or nonnatural amino acid;
[0053] and n is an integer from 1 to 5.

[0054] In one embodiment, said antibody or said antigen-binding fragment thereof comprises Gln295 and/or Gln297, and wherein the drug payload is conjugated to said antibody or antigen-binding fragment through the side chains of Gln295 and/or Gln297.

[0055] In one embodiment, said antibody or said antigen-binding fragment thereof is selected from an anti-HER2 antibody, an anti-STEAP2 antibody, an anti-MET antibody, an anti-EGFRVIII antibody, an anti-MUC16 antibody, an anti-PRLR antibody, an anti-PSMA antibody, an anti-FGFR2 antibody, an anti-FOLR1 antibody, an anti-HER2/HER2 bispecific antibody, an anti-MET/MET bispecific antibody, or an antigen-binding fragment thereof.

[0056] In one embodiment, the antibody or antigen-binding fragment thereof is an anti-HER2/HER2 bispecific antibody.

[0057] In one embodiment, the anti-HER2/HER2 bispecific antibody comprises:
[0058] a first antigen-binding domain (D1); and
[0059] a second antigen-binding domain (D2);
[0060] wherein D1 specifically binds a first epitope of human HER2; and
[0061] wherein D2 specifically binds a second epitope of human HER2.

[0062] In one embodiment, said antibody and linker-drug payload is conjugated site-specifically by using a transglutaminase.

[0063] In one embodiment, said transglutaminase is a microbial transglutaminase.

[0064] In another aspect, the present disclosure provides a pharmaceutical composition comprising an antibody-drug conjugate according to any one the above embodiments, co-formulated together with one or more pharmaceutically acceptable diluents, excipients, and/or additives.

[0065] In another aspect, the present disclosure provides a composition comprising a population of the antibody-drug conjugates according to any one of the above embodiments, having a drug-antibody ratio (DAR) of about 0.5 to about 30.0.

[0066] In one embodiment, the composition has a DAR of about 1.0 to about 2.5.

[0067] In one embodiment, the composition has a DAR of about 2.

[0068] In one embodiment, the composition has a DAR of about 3.0 to about 4.5.

[0069] In one embodiment, the composition has a DAR of about 4.

[0070] In one embodiment, the composition has a DAR of about 6.5 to about 8.5.

[0071] In one embodiment, the composition has a DAR of about 8.

[0072] In another aspect, the present disclosure provides a method for treating cancer in a subject in need thereof comprising the step of administering to the subject a therapeutically effective amount of the antibody-drug conjugate according to any one of the above embodiments, or the pharmaceutical composition of the above embodiments.

[0073] In another aspect, the present disclosure provides a process for manufacturing a linker-payload compound having the formula selected from the group consisting of (D′) to (N′):

[chemical structure]

[chemical structure]

[chemical structure]

[chemical structure]

[chemical structure]

[chemical structure]

[chemical structure]

or a pharmaceutically acceptable salt thereof,
[0074] wherein R¹, R², R³, and R⁴ are independently hydrogen or a C₁₋₅ alkyl;
[0075] B is selected from the group consisting of

[chemical structure]

[0076] W is NH, O, CO, CH₂, a phenyl, or a combination of two or more thereof; and
[0077] R⁵, R⁶, R⁷ and R⁸ are independently hydrogen, —NH₂, or a side chain of any natural or non-natural amino acid,
[0078] the method comprising a step of exposing a payload having an amino group to an activated intermediate having a para-nitro-phenyl carbonate in the presence of a base and a coupling catalyst to afford said linker-payload compound (D′)-(G′), wherein said coupling catalyst is 4-Hydroxy-2-methylquinoline (MeHYQ).

[0079] In another aspect, the present disclosure provides a process for manufacturing a linker-payload compound having the formula (D-1)

[chemical structure]

[0080] or a pharmaceutically acceptable salt thereof,
[0081] wherein R¹, R², R³, and R⁴ are independently hydrogen or a C₁₋₅ alkyl, and
[0082] R⁵ and R⁶ are independently hydrogen, —NH₂, or a side chain of any natural or non-natural amino acid,
[0083] the method comprising a step of exposing a drug payload having an amino group to an activated intermediate having a para-nitro-phenyl carbonate in the presence of a base and a coupling catalyst to afford said linker-payload compound (D), wherein said coupling catalyst is 4-Hydroxy-2-methylquinoline (MeHYQ).

[0084] In one embodiment, the activated intermediate having a para-nitro-phenyl carbonate has a structure according to formula I-I:

[chemical structure]

[0085] The present disclosure also relates to a process for manufacturing a linker-payload compound having the formula (D-1)

[chemical structure]

or a pharmaceutically acceptable salt thereof,
[0086] wherein R¹, R², R³, and R⁴ are independently hydrogen or a C₁₋₅ alkyl, and
[0087] R⁵ and R⁶ are independently hydrogen, —NH₂, or a side chain of any natural or non-natural amino acid,
[0088] said process comprising:
[0089] (a) providing a compound of Formula (1-1) having the structure:

[chemical structure]

[0090] where
[0091] X is selected from the group consisting of

[chemical structure]

and
[0092] (b) reacting the compound of Formula (1-1) with a compound of Formula (P-I):

[chemical structure]

[0093] wherein
[0094] R is H or PG; and
[0095] PG is a suitable protecting group;
[0096] to produce the compound of Formula (D-1).

[0097] In one embodiment, the compound of Formula (D-1) has the following structure:

[chemical structure]

[0098] In one embodiment, the step (b) of reacting the compound of Formula (I-1) with the compound of Formula (P-I) further comprises reacting the compound of Formula (P-I), wherein R is PG, with a protecting group removing agent prior to said reacting with the compound of Formula (I-1).

[0099] In one embodiment, the PG is selected from the group consisting of allyloxycarbonyl (Alloc), benzyloxycarbonyl (Cbz), tert-butyloxycarbonyl (Boc), and 9-fluorenylmethoxycarbonyl (Fmoc).

[0100] In one embodiment, the compound of Formula (I-1) has the following structure:

[chemical structure]

[0101] In one embodiment, the compound of Formula (P-I) has the following structure:

[chemical structure]

[0102] In one embodiment, the process for manufacturing a linker-payload compound having the formula (D-1) further comprises the steps of providing a compound of Formula (V) having the structure:

[chemical structure]

and forming the compound of Formula (1-1) from the compound of Formula (V) prior to the step (a).

[0103] In one embodiment, the step of forming the compound of Formula (1-1) comprises reacting the compound of Formula (V) with a compound of Formula (VIa) or Formula (VIb):

[chemical structure]

where X′ is halogen, to produce the compound of Formula (1-1).

[0104] In one embodiment, the process further comprises providing a compound of Formula (VII) having the structure:

[chemical structure]

wherein PG¹ is a suitable protecting group protecting group, and forming the compound of Formula (V) from the compound of Formula (VII).

[0105] In one embodiment, the PG¹ is selected from the group consisting of allyloxycarbonyl (Alloc), benzyloxycarbonyl (Cbz), tert-butyloxycarbonyl (Boc), and 9-fluorenylmethoxycarbonyl (Fmoc).

[0106] In one embodiment, the compound of Formula (VII) has the following structure:

[chemical structure]

[0107] In one embodiment, the step of forming the compound of Formula (V) comprises reacting the compound of Formula (VII) with a compound of Formula (VIII):

[chemical structure]

to produce the compound of Formula (V).

[0108] In one embodiment, the process further comprising the steps of providing a compound of Formula (IX) having the structure:

[chemical structure]

and forming the compound of Formula (VII) from the compound of Formula (IX).

[0109] In one embodiment, the compound of Formula (IX) has the following structure:

[chemical structure]

[0110] In one embodiment, the step of forming the compound of Formula (VII) comprises reacting the compound of Formula (IX) with a compound of Formula (X):

[chemical structure]

to produce the compound of Formula (VII).

[0111] In one embodiment, the process further comprises the steps of providing a compound of Formula (XI) having the structure:

[chemical structure]

and forming the compound of Formula (IX) from the compound of Formula (XI).

[0112] In one embodiment, the compound of Formula (XI) has the following structure:

[chemical structure]

[0113] In one embodiment, the step of forming the compound of Formula (IX) comprises reacting the compound of Formula (XI) with a compound of Formula (XII):

[chemical structure]

to produce the compound of Formula (IX).

[0114] In one embodiment, the process further comprises providing a compound of Formula (XIII) having the structure:

[chemical structure]

and
[0115] forming the compound of Formula (VIII) from the compound of Formula (XIII).

[0116] In one embodiment, the step of forming the compound of Formula (VIII) comprises reacting the compound of Formula (XIII) with a compound of Formula (XII):

[chemical structure]

to produce the compound of Formula (VIII).

[0117] In one embodiment, the process further comprises the steps of providing a compound of Formula (XIV) having the structure:

[chemical structure]

where
[0118] R^{a} is halogen; and
[0119] R^{b} is C₁₋₆ alkyl, and
[0120] forming the compound of Formula (XIII) from the compound of Formula (XIV).

[0121] In one embodiment, R^{a} is bromine.

[0122] In one embodiment, the compound of Formula (XIV) has the following structure:

[chemical structure]

[0123] In one embodiment, the step of forming the compound of Formula (XIII) comprises reacting the compound of Formula (XIV) with a base to produce the compound of Formula (XIII).

[0124] In one embodiment, the base is selected from the group consisting of sodium methoxide (NaOMe), potassium tert-butoxide (t-BuOK), sodium hydride (NaH), and lithium diisopropylamide (LDA)

[0125] In one embodiment, the process further comprises the steps of providing a compound of Formula (XV) having the structure:

[chemical structure]

and forming the compound of Formula (XIV) from the compound of Formula (XV).

[0126] In one embodiment, the compound of Formula (XV) has the following structure:

[chemical structure]

[0127] In one embodiment, the step of forming the compound of Formula (XIV) comprises reacting the compound of Formula (XV) with a compound of Formula (XVI):

[chemical structure]

to produce the compound of Formula (XIV).

[0128] In one embodiment, the process further comprises the steps of providing a compound of Formula (XVII) having the structure:

[chemical structure]

and forming the compound of Formula (XV) from the compound of Formula (XVII).

[0129] In one embodiment, the step of forming the compound of Formula (XV) comprises reacting the compound of Formula (XVII) with a bromination agent to produce the compound of Formula (XVII).

[0130] In one embodiment, the bromination agent is CHBr₃.

[0131] In one embodiment, the process further comprises the steps of providing a compound of Formula (XVIII) having the structure:

[chemical structure]

and forming the compound of Formula (P-I) from the compound of Formula (XVIII).

[0132] In one embodiment, the compound of Formula (XVIII) has the following structure:

[chemical structure]

[0133] In one embodiment, the step of forming the compound of Formula (P-I) comprises reacting the compound of Formula (XVIII) with a compound of Formula (XIX):

[chemical structure]

to produce the compound of Formula (P-I).

[0134] In one embodiment, the process further comprises the steps of providing a compound of Formula (XX) having the structure:

[chemical structure]

and forming the compound of Formula (XVIII) from the compound of Formula (XX).

[0135] In one embodiment, the compound of Formula (XX) has the following structure:

[chemical structure]

[0136] In one embodiment, the step of forming the compound of Formula (XVIII) comprises reacting the compound of Formula (XX) with a compound of Formula (XXI):

[chemical structure]

[0137] to produce the compound of Formula (XVIII).

[0138] In one embodiment, the process further comprises the steps of providing a compound of Formula (XXII) having the structure:

[chemical structure]

and forming the compound of Formula (XX) from the compound of Formula (XXII).

[0139] In one embodiment, the compound of Formula (XXII) has the following structure:

[chemical structure]

[0140] The present disclosure also relates to a process for preparation of a compound of Formula (I-1):

[chemical structure]

[0141] or a pharmaceutically acceptable salt thereof,
[0142] where
[0143] X is selected from the group consisting of

[chemical structure]

[0144] R¹, R², R³, and R⁴ are independently hydrogen or a C₁₋₅ alkyl, and
[0145] R⁵ and R⁶ are independently hydrogen, —NH₂, or a side chain of any natural or non-natural amino acid,
[0146] said process comprising:
[0147] (a) providing a compound of Formula (V) having the structure:

[chemical structure]

and
[0148] (b) forming the compound of Formula (1-1) from the compound of Formula (V).

[0149] In one embodiment, the compound of Formula (1-1) has the following structure:

[chemical structure]

[0150] In one embodiment, step (b) of forming the compound of Formula (1-1) comprises reacting the compound of Formula (V) with a compound of Formula (VIa) or Formula (VIb):

[chemical structure]

[0151] where X′ is halogen,
[0152] to produce the compound of Formula (1-1).

[0153] In one embodiment, the process further comprises the steps of providing a compound of Formula (VII) having the structure:

[chemical structure]

wherein PG¹ is a suitable protecting group protecting group, and forming the compound of Formula (V) from the compound of Formula (VII).

[0154] In one embodiment, the compound of Formula (VII) has the following structure:

[chemical structure]

[0155] In one embodiment, the step of forming the compound of Formula (V) comprises reacting the compound of Formula (VII) with a compound of Formula (VIII):

[chemical structure]

to produce the compound of Formula (V).

[0156] In one embodiment, the process further comprises the steps of providing a compound of Formula (IX) having the structure:

[chemical structure]

and forming the compound of Formula (VII) from the compound of Formula (IX).

[0157] In one embodiment, the compound of Formula (IX) has the following structure:

[chemical structure]

[0158] In one embodiment, the step of forming the compound of Formula (VII) comprises reacting the compound of Formula (IX) with a compound of Formula (X):

[chemical structure]

to produce the compound of Formula (VII).

[0159] In one embodiment, the process further comprises the steps of providing a compound of Formula XI) having the structure:

[chemical structure]

and forming the compound of Formula (IX) from the compound of Formula (XI).

[0160] In one embodiment, the compound of Formula (XI) has the following structure:

[chemical structure]

[0161] In one embodiment, the step of forming the compound of Formula (IX) comprises reacting the compound of Formula (XI) with a compound of Formula (XII):

[chemical structure]

to produce the compound of Formula (IX).

[0162] The present disclosure also relates to a process for preparation of a compound of Formula (XVIII):

[chemical structure]

[0163] or a pharmaceutically acceptable salt thereof,
[0164] wherein R¹, R², R³, and R⁴ are independently hydrogen or a C₁₋₅ alkyl, and
[0165] R⁵ and R⁶ are independently hydrogen, —NH₂, or a side chain of any natural or non-natural amino acid. This process comprises:
[0166] (a) providing a compound of Formula (XX) having the structure:

[chemical structure]

and
[0167] (b) forming the compound of Formula (XVIII) from the compound of Formula (XX).

[0168] In one embodiment, the compound of Formula (XVIII) has the following structure:

[chemical structure]

[0169] In one embodiment, the compound of Formula (XX) has the following structure:

[chemical structure]

[0170] In one embodiment, the step of forming the compound of Formula (XVIII) comprises reacting the compound of Formula (XX) with a compound of Formula (XXI):

[chemical structure]

to produce the compound of Formula (XVIII).

[0171] In one embodiment, the process further comprises the steps of providing a compound of Formula (XXII) having the structure:

[chemical structure]

and forming the compound of Formula (XX) from the compound of Formula (XXII).

[0172] In one embodiment, the compound of Formula (XXII) has the following structure:

[chemical structure]

[0173] The present disclosure also relates to a process for preparation of a compound of Formula (D-1):

[chemical structure]

[0174] or a pharmaceutically acceptable salt thereof,
[0175] wherein R¹, R², R³, and R⁴ are independently hydrogen or a C₁₋₅ alkyl, and
[0176] R⁵ and R⁶ are independently hydrogen, —NH₂, or a side chain of any natural or non-natural amino acid. This process comprises:
[0177] (a) providing a compound of Formula (I-1) having the structure:

[chemical structure]

wherein
[0178] X is selected from the group consisting of

[chemical structure]

and
[0179] (b) reacting the compound of Formula (1-1) with a compound of Formula (P-I):

[chemical structure]

[0180] wherein
[0181] R is H or PG; and
[0182] PG is a suitable protecting group,
[0183] to produce the compound of Formula (D-1).

[chemical structure]

[0184] In one embodiment, the compound of Formula (1-1) has the following structure:

[chemical structure]

[0185] In one embodiment, the step (b) of reacting the compound of Formula (1-1) with the compound of Formula (P-I) further comprises reacting the compound of Formula (P-I), wherein R is PG, with a protecting group removing agent prior to said reacting with the compound of Formula (1-1).

[0186] In one embodiment, the PG is selected from the group consisting of allyloxycarbonyl (Alloc), benzyloxycarbonyl (Cbz), tert-butyloxycarbonyl (Boc), and 9-fluorenylmethoxycarbonyl (Fmoc).

[0187] In one embodiment, the compound of Formula (P-I) has the following structure:

[chemical structure]

[0188] In one embodiment, the process further comprises the steps of providing a compound of Formula (XVIII) having the structure:

[chemical structure]

and forming the compound of Formula (P-I) from the compound of Formula (XVIII).

[0189] In one embodiment, the compound of Formula (XVIII) has the following structure:

[chemical structure]

[0190] In one embodiment, the step of forming the compound of Formula (P-I) comprises reacting the compound of Formula (XVIII) with a compound of Formula (XIX):

[chemical structure]

to produce the compound of Formula (P-I).

[0191] The present disclosure also relates to a process for preparation of a compound of Formula (D-1):

[chemical structure]

or a pharmaceutically acceptable salt thereof,
[0192] wherein R¹, R², R³, and R⁴ are independently hydrogen or a C₁₋₅ alkyl, and
[0193] R⁵ and R⁶ are independently hydrogen, —NH₂, or a side chain of any natural or non-natural amino acid,
[0194] said process comprising:
[0195] (a) providing a compound of Formula (XXIII):
   and

[chemical structure]

[0196] (b) reacting the compound of Formula (XXIII) with a compound having the structure:

[chemical structure]

[0197] F in the presence of an activating reagent and a base to produce the compound of Formula (D-1).

[0198] In one embodiment, the compound of Formula (D-1) has the following structure:

[chemical structure]

[0199] In one aspect, the present disclosure provides a compound of Formula (I-1):

[chemical structure]

[0200] or a pharmaceutically acceptable salt thereof,
[0201] where
[0202] X is selected from the group consisting of

[chemical structure]

[0203] R¹, R², R³, and R⁴ are independently hydrogen or a C₁₋₅ alkyl, and
[0204] R⁵ and R⁶ are independently hydrogen, —NH₂, or a side chain of any natural or non-natural amino acid.

[0205] In one embodiment, the compound of Formula (1-1) has the following structure:

[chemical structure]

[0206] In one aspect, the present disclosure provides a compound of Formula (XVIII):

[chemical structure]

[0207] or a pharmaceutically acceptable salt thereof,
[0208] wherein R¹, R², R³, and R⁴ are independently hydrogen or a C₁₋₅ alkyl, and
[0209] R⁵ and R⁶ are independently hydrogen, —NH₂, or a side chain of any natural or non-natural amino acid.

[0210] In one embodiment, the compound of Formula (XVIII) has the following structure:

[chemical structure]

[0211] In another aspect, the present disclosure provides a linker-payload compound of formula (D),

[chemical structure]

or a pharmaceutically acceptable salt thereof, wherein R¹, R², R³, and R⁴ are independently hydrogen or a C₁₋₅ alkyl, and
[0212] R⁵ and R⁶ are independently hydrogen, —NH₂, or a side chain of any natural or non-natural amino acid.

[0213] In another aspect, the present disclosure provides a linker-payload compound having the formula selected from the group consisting of (D′) to (N′):

[chemical structure]

[chemical structure]

[chemical structure]

[chemical structure]

[chemical structure]

[chemical structure]

or a pharmaceutically acceptable salt thereof,
[0214] wherein R¹, R², R³, and R⁴ are independently hydrogen or a C₁₋₅ alkyl;
[0215] B is selected from the group consisting of

[chemical structure]

[0216] W is NH, O, CO, CH₂, a phenyl, or a combination of two or more thereof; and
[0217] R⁵, R⁶, R⁷ and R⁸ are independently hydrogen, —NH₂, or a side chain of any natural or non-natural amino acid,
[0218] the method comprising a step of exposing a payload having an amino group to an activated intermediate having a para-nitro-phenyl carbonate in the presence of a base and a coupling catalyst to afford said linker-payload compound (D′)-(G′), wherein said coupling catalyst is 4-Hydroxy-2-methylquinoline (MeHYQ).

[0219] In one embodiment, the structure is selected from the group consisting of:

[chemical structure]

[chemical structure]

[chemical structure]

[chemical structure]

[chemical structure]

[chemical structure]

[chemical structure]

[chemical structure]

[chemical structure]

[chemical structure]

[chemical structure]

[chemical structure]

[chemical structure]

[chemical structure]

[chemical structure]

[0220] In one embodiment, the structure is selected from the group consisting of:

[chemical structure]

[0221] These and other aspects of the present disclosure will become apparent to those skilled in the art after a reading of the following detailed description of the disclosure, including the appended claims.

### BRIEF DESCRIPTION OF THE DRAWINGS

[0222] The patent or application file contains at least one drawing executed in color. Copies of this patent or patent application publication with color drawing(s) will be provided by the Office upon request and payment of the necessary fee.

[0223] FIG. 1 is a schematic demonstrating two-step site-specific generation of Dxd-ADCs according to an embodiment of the disclosure. The first step is conjugation of one or more first linkers (L1-B′) with a glutamine residue on an antibody via a transglutaminase (e.g., MTG)-mediated conjugation reaction. The second step is conjugation of antibody-L1-B to one or more Linker 2-Payloads (L2P).

[0224] FIGS. 2A and 2B are schematics demonstrating specific non-limiting embodiments of the disclosure. FIG. 2A is a schematic of a two-step site-specific generation of Dxd-ADCs with glutamine residues at position 295 having a DAR of 2 times n times m according to an embodiment of the present disclosure. FIG. 2B is a schematic of a two-step site-specific generation of Dxd-ADCs with a glutamine residue at positions 295 and 297 having a DAR of 4 times n times m according to an embodiment of the present disclosure.

[0225] FIG. 3A is a schematic demonstrating two-step site-specific generation of one specific embodiment of a Dxd-ADC according to the disclosure. The first step is to conjugate a linear first linker 1 (L1-B′) comprising one azide moiety (—N₃) to glutamine residues at positions 295 and 297 of an antibody via an MTG-mediated conjugation reaction, generating an antibody having 4 azide-comprising linkers attached to it (Ab-(N₃)₄). The second step is to attach Ab-(N₃)₄ to a specific Linker2-Payload (L2P) via the azide-cycloalkyne 1,3 cycloaddition reaction, generating a Dxd-ADC with a DAR of 4. FIG. 3B depicts schematics of ADCs and exemplary amino azido linkers having a DAR of 2 or 4 suitable for use in an embodiment of the present disclosure depicted in FIG. 3A.

[0226] FIG. 4A is a schematic demonstrating two-step site-specific generation of one specific embodiment of a Dxd-ADC according to the disclosure. The first step is to conjugate a branched first linker 1 (L1-B′) comprising two azide moieties (—N₃) to glutamine residues at positions 295 and 297 of an antibody via an MTG-mediated conjugation reaction, generating an antibody having 8 azide-comprising linkers attached to it (Ab-(N₃)₈). The second step is to attach Ab-(N₃)₈ to a specific Linker2-Payload (L2P) via the azide-cycloalkyne 1,3 cycloaddition reaction, generating a Dxd-ADC with a DAR of 8. FIG. 4B depicts schematics of ADCs and exemplary branched alkyl azide amine linkers suitable for use in an embodiment of the present disclosure depicted in FIG. 4A.

[0227] FIG. 5 is a schematic of 2-step antibody-drug conjugation according to an embodiment of the present disclosure. Step 1: site-specific conjugation of Handle-functionalized amine with an Antibody generated a drug conjugate containing 2, 4 or 8 handles per antibody. Here, AL=non-branched Handle-functionalized amine, BL=branched Handle-functionalized amine. Step 2: click reactions between Handle-functionalized antibodies and a Linker-Payload (LP) to generate the site-specific ADCs.

[0228] FIG. 6 depicts an exemplary conjugation procedure according to the present disclosure.

[0229] FIG. 7A depicts three approaches to the preparation of antibody-drug conjugates according to the disclosure. For approaches 1 and 2, the handle may be bivalent or multivalent. An amine handle can be conjugated to an antibody via transglutaminase-mediated conjugation to generate an Ab-Handle; another moiety in the handle of the Ab-Handle can be clicked with a linker-payload to generate an ADC. Where the handle has a diene, the linker-payload has a dienophile, or vice versa. For approach 3, shown in FIG. 7B, the linker-payload may be conjugated to an antibody directly; LL containing an amine moiety that can be conjugated with an antibody via transglutaminase-mediated conjugation; LL containing a moiety reacting with cysteine-SH can be conjugated to antibody-cystine via Michael addition.

[0230] FIG. 8 is a graph showing Linker-ProDXd LP1 in mouse whole blood (SEQ ID NO: 2121).

[0231] FIG. 9 shows the schematic process of the preparation of the liver S9 and the liver microsomes from hepatocytes.

### DETAILED DESCRIPTION

[0232] Detailed embodiments of the present disclosure are disclosed herein; however, it is to be understood that the disclosed embodiments are merely illustrative of the disclosure that may be embodied in various forms. In addition, each of the examples given in connection with the various embodiments of the disclosure is intended to be illustrative, and not restrictive. Therefore, specific structural and functional details disclosed herein are not to be interpreted as limiting, but merely as a representative basis for teaching one skilled in the art to variously employ the present disclosure.

### Definitions

[0233] Unless defined otherwise, all technical and scientific terms used herein have the same meaning as commonly understood by one of ordinary skill in the art to which this disclosure belongs.

[0234] As used in this specification and the appended claims, the singular forms “a”, “an”, and “the” include plural references unless the context clearly dictates otherwise. Thus, for example, a reference to “a method” includes one or more methods, and/or steps of the type described herein and/or which will become apparent to those persons skilled in the art upon reading this disclosure.

[0235] The terms “treat” or “treatment” of a state, disorder or condition include: (1) preventing, delaying, or reducing the incidence and/or likelihood of the appearance of at least one clinical or sub-clinical symptom of the state, disorder or condition developing in a subject that may be afflicted with or predisposed to the state, disorder or condition but does not yet experience or display clinical or subclinical symptoms of the state, disorder or condition; or (2) inhibiting the state, disorder or condition, i.e., arresting, reducing or delaying the development of the disease or a relapse thereof or at least one clinical or sub-clinical symptom thereof; or (3) relieving the disease, i.e., causing regression of the state, disorder or condition or at least one of its clinical or sub-clinical symptoms. The benefit to a subject to be treated is either statistically significant or at least perceptible to the patient or to the physician. In some embodiments, treatment comprises methods wherein cells are ablated in such manner where disease is indirectly impacted. In certain embodiments, treatment comprises depleting immune cells as a hematopoietic conditioning regimen prior to therapy.

[0236] A “subject” or “patient” or “individual” or “animal”, as used herein, refers to humans, veterinary animals (e.g., cats, dogs, cows, horses, sheep, pigs, etc.) and experimental animal models of diseases (e.g., mice, rats). In a preferred embodiment, the subject is a human.

[0237] As used herein the term “effective” applied to dose or amount refers to that quantity of a compound or pharmaceutical composition that is sufficient to result in a desired activity upon administration to a subject in need thereof. Note that when a combination of active ingredients is administered, the effective amount of the combination may or may not include amounts of each ingredient that would have been effective if administered individually. The exact amount required will vary from subject to subject, depending on the species, age, and general condition of the subject, the severity of the condition being treated, the particular drug or drugs employed, the mode of administration, and the like.

[0238] The phrase “pharmaceutically acceptable salt”, as used in connection with compositions of the disclosure, refers to any salt suitable for administration to a patient. Suitable salts include, but are not limited to, those disclosed in Berge et al., “Pharmaceutical Salts”, J. Pharm. Sci., 1977, 66:1, incorporated herein by reference. Examples of salts include, but are not limited to, acid derived, base derived, organic, inorganic, amine, and alkali or alkaline earth metal salts, including but not limited to calcium salts, magnesium salts, potassium salts, sodium salts, salts of hydrochloric acid, hydrobromic acid, sulfuric acid, nitric acid, phosphoric acid, acetic acid, propionic acid, glycolic acid, pyruvic acid, oxalic acid, maleic acid, malonic acid, succinic acid, fumaric acid, tartaric acid, citric acid, benzoic acid, cinnamic acid, mandelic acid, methane sulfonic acid, ethane sulfonic acid, p toluene sulfonic acid, salicylic acid, and the like. In some examples, a payload described herein (e.g., a rifamycin analog described herein) comprises a tertiary amine, where the nitrogen atom in the tertiary amine is the atom through which the payload is bonded to a linker or a linker-spacer. In such instances, bonding to the tertiary amine of the payload yields a quaternary amine in the linker-payload molecule. The positive charge on the quaternary amine can be balanced by a counter ion (e.g., chloro, bromo, iodo, or any other suitably charged moiety such as those described herein).

[0239] Ranges can be expressed herein as from “about” or “approximately” one particular value and/or to “about” or “approximately” another particular value. When such a range is expressed, another embodiment includes from the one particular value and/or to the other particular value.

[0240] By “comprising” or “containing” or “including” is meant that at least the named compound, element, particle, or method step is present in the composition or article or method, but does not exclude the presence of other compounds, materials, particles, or method steps, even if the other such compounds, material, particles, or method steps have the same function as what is named.

[0241] Compounds of the present disclosure include those described generally herein, and are further illustrated by the classes, subclasses, and species disclosed herein. As used herein, the following definitions shall apply unless otherwise indicated. For purposes of this disclosure, the chemical elements are identified in accordance with the Periodic Table of the Elements, CAS version, Handbook of Chemistry and Physics, 75th Ed. Additionally, general principles of organic chemistry are described in “Organic Chemistry”, Thomas Sorrell, University Science Books, Sausalito: 1999, and “March's Advanced Organic Chemistry”, 5th Ed., Ed.: Smith, M. B. and March, J., John Wiley & Sons, New York: 2001, the entire contents of which are hereby incorporated by reference.

[0242] As used herein, the term “alkyl” is given its ordinary meaning in the art and may include saturated aliphatic groups, including straight-chain alkyl groups, branched-chain alkyl groups, cycloalkyl (alicyclic) groups, alkyl substituted cycloalkyl groups, and cycloalkyl substituted alkyl groups. In certain embodiments, a straight chain or branched chain alkyl has about 1-20 carbon atoms in its backbone (e.g., C₁-C₂₀ for straight chain, C₂-C₂₀ for branched chain), and alternatively, about 1-10 carbon atoms, or about 1 to 6 carbon atoms. In some embodiments, a cycloalkyl ring has from about 3-10 carbon atoms in their ring structure where such rings are monocyclic or bicyclic, and alternatively about 5, 6 or 7 carbons in the ring structure. In some embodiments, an alkyl group may be a lower alkyl group, wherein a lower alkyl group comprises 1-4 carbon atoms (e.g., C₁-C₄ for straight chain lower alkyls).

[0243] As used herein, the term “alkenyl” refers to an alkyl group, as defined herein, having one or more double bonds.

[0244] As used herein, the term “alkynyl” refers to an alkyl group, as defined herein, having one or more triple bonds.

[0245] The term “aryl” used alone or as part of a larger moiety as in “aralkyl,” “aralkoxy,” or “aryloxyalkyl,” refers to monocyclic or bicyclic ring systems having a total of five to fourteen ring members, wherein at least one ring in the system is aromatic and wherein each ring in the system contains 3 to 7 ring members. The term “aryl” may be used interchangeably with the term “aryl ring.” In certain embodiments of the present invention, “aryl” refers to an aromatic ring system which includes, but not limited to, phenyl, biphenyl, naphthyl, binaphthyl, anthracyi and the like, which may bear one or more substituents. Also included within the scope of the term “aryl,” as it is used herein, is a group in which an aromatic ring is fused to one or more non-aromatic rings, such as indanyl, phthalimidyl, naphthimidyl, phenanthridinyl, or tetrahydronaphthyl, and the like.

[0246] The term “heteroatom” means one or more of oxygen, sulfur, nitrogen, phosphorus, or silicon (including, any oxidized form of nitrogen, sulfur, phosphorus, or silicon; the quaternized form of any basic nitrogen or; a substitutable nitrogen of a heterocyclic ring.

[0247] The term “halogen” means F, Cl, Br, or I; the term “halide” refers to a halogen radical or substituent, namely —F, —Cl, —Br, or —I.

[0248] The term “click chemistry” refers to a class of biocompatible small molecule reactions commonly used in bioconjugation, allowing the joining of substrates of choice with specific biomolecules. Click chemistry is not a single specific reaction, but describes a way of generating products that follow examples in nature, which also generates substances by joining small modular units. Click chemistry is not limited to biological conditions: the concept of a “click” reaction may be used in chemoproteomic, pharmacological, and various biomimetic applications. Specific non-limiting examples of click chemistry reactions include:
[0249] (a) strain-promoted azide/dibenzocyclooctyne-amine (DBCO) click chemistry;
[0250] (b) inverse electron demand Diels-Alder (IED-DA) tetrazine/trans-cyclooctene (TCO) click chemistry;
[0251] (c) inverse electron demand Diels-Alder (IED-DA) tetrazine/norbonene click chemistry;
[0252] (d) Diels-Alder maleimide/furan click-chemistry;
[0253] (e) Staudinger ligation; and
[0254] (f) nitrile-oxide/norbonene cycloaddition click chemistry.

[0255] The term “adduct”, e.g., “an adduct of group B” or “a click chemistry adduct” of the present disclosure encompasses any moiety comprising the product of an addition reaction, e.g., an addition reaction of group B or a click chemistry addition reaction, independent of the synthetic steps taken to produce the moiety.

[0256] The term “covalent attachment” means formation of a covalent bond, i.e., a chemical bond that involves sharing of one or more electron pairs between two atoms. Covalent bonding may include different interactions, including but not limited to σ-bonding, τ-bonding, metal-to-metal bonding, agostic interactions, bent bonds, and three-center two-electron bonds. When a first group is said to be “capable of covalently attaching” to a second group, this means that the first group is capable of forming a covalent bond with the second group, directly or indirectly, e.g., through the use of a catalyst or under specific reaction conditions. Non-limiting examples of groups capable of covalently attaching to each other may include, e.g., an amine and a carboxylic acid (forming an amide bond), a diene and a dienophile (via a Diels-Alder reaction), and an azide and an alkyne (forming a triazole via a 1,3-cycloaddition reaction).

[0257] As described herein, compounds of the disclosure may contain “optionally substituted” moieties. In general, the term “substituted,” whether preceded by the term “optionally” or not, means that one or more hydrogens of the designated moiety are replaced with a suitable substituent. Unless otherwise indicated, an “optionally substituted” group may have a suitable substituent at each substitutable position of the group, and when more than one position in any given structure may be substituted with more than one substituent selected from a specified group, the substituent may be either the same or different at every position. Combinations of substituents envisioned by this disclosure are preferably those that result in the formation of stable or chemically feasible compounds. The term “stable,” as used herein, refers to compounds that are not substantially altered when subjected to conditions to allow for their production, detection, and, in certain embodiments, their recovery, purification, and use for one or more of the purposes disclosed herein.

[0258] Unless otherwise stated, structures depicted herein are also meant to include all isomeric (e.g., enantiomeric, diastereomeric, and geometric (or conformational)) forms of the structure; for example, the R and S configurations for each asymmetric center, (Z) and (E) double bond isomers, and (Z) and (E) conformational isomers. Therefore, single stereochemical isomers as well as enantiomeric, diastereomeric, and geometric (or conformational) mixtures of the present compounds are within the scope of the disclosure.

[0259] Unless otherwise stated, all tautomeric forms of the compounds of the disclosure are within the scope of the disclosure.

[0260] Additionally, unless otherwise stated, structures depicted herein are also meant to include compounds that differ only in the presence of one or more isotopically enriched atoms. For example, compounds having the present structures except for the replacement of hydrogen by deuterium or tritium, or the replacement of a carbon by a ¹¹C- or ¹³C- or ¹⁴C-enriched carbon are within the scope of this disclosure.

[0261] It is also to be understood that the mention of one or more method steps does not preclude the presence of additional method steps or intervening method steps between those steps expressly identified. Similarly, it is also to be understood that the mention of one or more components in a device or system does not preclude the presence of additional components or intervening components between those components expressly identified.

[0262] Unless otherwise stated, all crystalline forms of the compounds of the disclosure and salts thereof are also within the scope of the disclosure. The compounds of the disclosure may be isolated in various amorphous and crystalline forms, including without limitation forms which are anhydrous, hydrated, non-solvated, or solvated. Example hydrates include hemihydrates, monohydrates, dihydrates, and the like. In some embodiments, the compounds of the disclosure are anhydrous and non-solvated. By “anhydrous” is meant that the crystalline form of the compound contains essentially no bound water in the crystal lattice structure, i.e., the compound does not form a crystalline hydrate.

[0263] As used herein, “crystalline form” is meant to refer to a certain lattice configuration of a crystalline substance. Different crystalline forms of the same substance typically have different crystalline lattices (e.g., unit cells) which are attributed to different physical properties that are characteristic of each of the crystalline forms. In some instances, different lattice configurations have different water or solvent content. The different crystalline lattices can be identified by solid state characterization methods such as by X-ray powder diffraction (PXRD). Other characterization methods such as differential scanning calorimetry (DSC), thermogravimetric analysis (TGA), dynamic vapor sorption (DVS), solid state NMR, and the like further help identify the crystalline form as well as help determine stability and solvent/water content.

[0264] Crystalline forms of a substance include both solvated (e.g., hydrated) and non-solvated (e.g., anhydrous) forms. A hydrated form is a crystalline form that includes water in the crystalline lattice. Hydrated forms can be stoichiometric hydrates, where the water is present in the lattice in a certain water/molecule ratio such as for hemihydrates, monohydrates, dihydrates, etc. Hydrated forms can also be non-stoichiometric, where the water content is variable and dependent on external conditions such as humidity.

[0265] In some embodiments, the compounds of the disclosure are substantially isolated. By “substantially isolated” is meant that a particular compound is at least partially isolated from impurities. For example, in some embodiments a compound of the disclosure comprises less than about 50%, less than about 40%, less than about 30%, less than about 20%, less than about 15%, less than about 10%, less than about 5%, less than about 2.5%, less than about 1%, or less than about 0.5% of impurities. Impurities generally include anything that is not the substantially isolated compound including, for example, other crystalline forms and other substances.

[0266] Certain groups, moieties, substituents, and atoms are depicted with a wavy line. The wavy line can intersect or cap a bond or bonds. The wavy line indicates the atom through which the groups, moieties, substituents, or atoms are bonded. For example, a phenyl group that

[chemical structure]

is substituted with a propyl group depicted as: HCH has the following structure:

[chemical structure]

[0267] The expression “HER2” or “human epidermal growth factor receptor 2” refers to a member of the human epidermal growth factor receptor family. The protein is also known as NEU; NGL; HER2; TKR1; CD340; HER-2; MLN 19; HER-2/neu. HER2 can refer to the amino acid sequence as set forth in NCBI accession No. NP_004439.2. Amplification or over-expression of this oncogene has been shown to play an important role in the development and progression of certain aggressive types of breast cancer. In recent years the protein has become an important biomarker and target of therapy for approximately 30% of breast cancer patient. All references to proteins, polypeptides and protein fragments herein are intended to refer to the human version of the respective protein, polypeptide or protein fragment unless explicitly specified as being from a non-human species. Thus, the expression “HER2” means human HER2 unless specified as being from a non-human species, e.g., “mouse HER2,” “monkey HER2,” etc.

[0268] The phrase “an antibody that binds HER2” or an “anti-HER2 antibody” includes antibodies and antigen-binding fragments thereof that specifically recognize HER2.

[0269] The phrase an “anti-HER2/HER2” antibody, e.g., an “anti-HER2/HER2 bispecific antibody” includes antibodies and antigen-binding fragments thereof that specifically recognize two different HER2 epitopes. In some embodiments, bispecific antibodies and antigen-binding fragments thereof comprise a first antigen-binding domain (D1) which specifically binds a first epitope of human HER2 and a second antigen-binding domain (D2) which specifically binds a second epitope of human HER2.

[0270] The expression “STEAP2,” as used herein, refers to six-transmembrane epithelial antigen of prostate 2. STEAP2 is an integral, six-transmembrane-spanning protein that is highly expressed in prostate epithelial cells and is a cell-surface marker for prostate cancer, for example STEAP2 was found to be expressed in significant levels on an LNCaP prostate cell line (Porkka, et al. Lab Invest 2002, 82:1573-1582). STEAP2 (UniProtKB/Swiss-Prot: Q8NFT2.3) is a 490-amino acid protein encoded by STEAP2 gene located at the chromosomal region 7q21 in humans, see e.g., the amino acid sequence of human STEAP2 as set forth in Tables 5 and 6.

[0271] As used herein, “an antibody that binds STEAP2” or an “anti-STEAP2 antibody” includes antibodies and antigen-binding fragments thereof that specifically recognize STEAP2.

[0272] The phrase “an antibody that binds MET” or an “anti-MET antibody” includes antibodies and antigen-binding fragments thereof that specifically recognize MET. The expressions “MET,” “c-Met,” and the like, as used herein, refer to the human membrane spanning receptor tyrosine kinase.

[0273] The phrase an “anti-MET/MET” antibody, e.g., an “anti-MET/MET bispecific antibody” includes antibodies and antigen-binding fragments thereof that specifically recognize two different MET epitopes. In some embodiments, bispecific antibodies and antigen-binding fragments thereof comprise a first antigen-binding domain (D1) which specifically binds a first epitope of human MET and a second antigen-binding domain (D2) which specifically binds a second epitope of human MET.

[0274] All amino acid abbreviations used in this disclosure are those accepted by the United States Patent and Trademark Office as set forth in 37 C.F.R. § 1.822 (B)(J).

[0275] The term “protein” means any amino acid polymer having more than about 20 amino acids covalently linked via amide bonds. As used herein, “protein” includes biotherapeutic proteins, recombinant proteins used in research or therapy, trap proteins and other Fc-fusion proteins, chimeric proteins, antibodies, monoclonal antibodies, human antibodies, bispecific antibodies, antibody fragments, nanobodies, recombinant antibody chimeras, scFv fusion proteins, cytokines, chemokines, peptide hormones, and the like. Proteins can be produced using recombinant cell-based production systems, such as the insect bacculovirus system, yeast systems (e.g., Pichia sp.), mammalian systems (e.g., CHO cells and CHO derivatives like CHO-K1 cells).

[0276] The term “natural amino acid” and “natural amino acid side chain” means any naturally occurring amino acid, and side chain thereof, respectively. These include 20 L-amino acids naturally occurring in the human body.

[0277] The term “nonnatural (also spelled non-natural and non natural) amino acid” and “nonnatural amino acid side chain” means an amino acid, and side chain thereof, respectively, which does not naturally occur in the subject organism, e.g., a human. Such nonnatural amino acids may be produced synthetically or generated naturally in a different setting, e.g., in a different organism. Non-limiting examples of nonnatural amino acids may include D-amino acids, homo-amino acids, beta-homo-amino acids, N-methyl amino acids, α-methyl amino acids, and amino acids that occur in, e.g., microbial peptides, such as citrulline (Cit), hydroxyproline (Hyp), norleucine (Nle), 3-nitrotyrosine, nitroarginine, ornithine (Orn), naphtylalanine (Nal), Abu, DAB, methionine sulfoxide or methionine sulfone.

[0278] All references to proteins, polypeptides and protein fragments herein are intended to refer to the human version of the respective protein, polypeptide or protein fragment unless explicitly specified as being from a non-human species. Thus, the expression “STEAP2” means human STEAP2 unless specified as being from a non-human species, e.g., “mouse STEAP2,” “monkey STEAP2,” etc.

[0279] The amino acid sequence of an antibody can be numbered using any known numbering schemes, including those described by Kabat et al., (“Kabat” numbering scheme); Al-Lazikani et al., 1997, J. Mol. Biol., 273:927-948 (“Chothia” numbering scheme); MacCallum et al., 1996, J. Mol. Biol. 262:732-745 (“Contact” numbering scheme); Lefranc et al., Dev. Comp. Immunol., 2003, 27:55-77 (“IMGT” numbering scheme); and Honegge and Pluckthun, J. Mol. Biol., 2001, 309:657-70 (“AHo” numbering scheme). Unless otherwise specified, the numbering scheme used herein is the Kabat numbering scheme. However, selection of a numbering scheme is not intended to imply differences in sequences where they do not exist, and one of skill in the art can readily confirm a sequence position by examining the amino acid sequence of one or more antibodies. Unless stated otherwise, the “EU numbering scheme” is generally used when referring to a residue in an antibody heavy chain constant region (e.g., as reported in Kabat et al., supra).

[0280] The term “glutaminyl-modified antibody” refers to an antibody with at least one covalent linkage from a glutamine side chain to a primary amine compound of the present disclosure. In particular embodiments, the primary amine compound is linked through an amide linkage on the glutamine side chain. In certain embodiments, the glutamine is an endogenous glutamine. In other embodiments, the glutamine is an endogenous glutamine made reactive by polypeptide engineering (e.g., via amino acid deletion, insertion, substitution, or mutation on the polypeptide). In additional embodiments, the glutamine is polypeptide engineered with an acyl donor glutamine-containing tag (e.g., glutamine-containing peptide tags, Q-tags or TGase recognition tag).

[0281] The term “TGase recognition tag” refers to a sequence of amino acids comprising an acceptor glutamine residue and that when incorporated into (e.g., appended to) a polypeptide sequence, under suitable conditions, is recognized by a TGase and leads to cross-linking by the TGase through a reaction between an amino acid side chain within the sequence of amino acids and a reaction partner. The recognition tag may be a peptide sequence that is not naturally present in the polypeptide comprising the TGase recognition tag. In some embodiments, the TGase recognition tag comprises at least one Gln. In some embodiments, the TGase recognition tag comprises an amino acid sequence XXQX, wherein X is any amino acid (e.g., conventional amino acid Leu, Ala, Gly, Ser, Val, Phe, Tyr, His, Arg, Asn, Glu, Asp, Cys, Gln, lie, Met, Pro, Thr, Lys, or Trp or nonconventional amino acid). In some embodiments, the acyl donor glutamine-containing tag comprises an amino acid sequence selected from the group consisting of LLQGG (SEQ ID NO:1936), LLQG (SEQ ID NO:1937), LSLSQG (SEQ ID NO:1938), gGGLLQGG (SEQ ID NO:1939), gLLQG (SEQ ID NO:1940), LLQ, gSPLAQSHGG (SEQ ID NO:1941), gLLQGGG (SEQ ID NO:1942), gLLQGG (SEQ ID NO:1943), gLLQ (SEQ ID NO:1944), LLQLLQGA (SEQ ID NO:1945), LLQGA (SEQ ID NO:1946), LLQYQGA (SEQ ID NO:1947), LLQGSG (SEQ ID NO:1948), LLQYQG (SEQ ID NO:1949), LLQLLQG (SEQ ID NO:1950), SLLQG (SEQ ID NO:1951), LLQLQ (SEQ ID NO:1952), LLQLLQ (SEQ ID NO:1953), and LLQGR (SEQ ID NO:1954). See for example, WO2012059882, the entire contents of which are incorporated herein.

[0282] The term “antibody,” as used herein, means any antigen-binding molecule or molecular complex comprising at least one complementarity determining region (CDR) that specifically binds to or interacts with a particular antigen. The term “antibody” includes immunoglobulin molecules comprising four polypeptide chains, two heavy (H) chains and two light (L) chains inter-connected by disulfide bonds, as well as multimers thereof (e.g., IgM). Each heavy chain comprises a heavy chain variable region (abbreviated herein as HCVR or VH) and a heavy chain constant region. The heavy chain constant region comprises three domains, CH1, CH2, and CH3. Each light chain comprises a light chain variable region (abbreviated herein as LCVR or VL) and a light chain constant region. The light chain constant region comprises one domain (CL1). The VH and VL regions can be further subdivided into regions of hypervariability, termed complementarity determining regions (CDRs), interspersed with regions that are more conserved, termed framework regions (FR). Each VH and VL is composed of three CDRs and four FRs, arranged from amino-terminus to carboxy-terminus in the following order: FR1, CDR1, FR2, CDR2, FR3, CDR3, FR4. In different embodiments, the FRs of the antibody (or antigen-binding portion thereof) can be identical to the human germline sequences, or can be naturally or artificially modified. An amino acid consensus sequence can be defined based on a side-by-side analysis of two or more CDRs.

[0283] The term “antibody,” as used herein, also includes antigen-binding fragments of full antibody molecules. The terms “antigen-binding portion” of an antibody, “antigen-binding fragment” of an antibody, and the like, as used herein, include any naturally occurring, enzymatically obtainable, synthetic, or genetically engineered polypeptide or glycoprotein that specifically binds an antigen to form a complex. Antigen-binding fragments of an antibody can be derived, e.g., from full antibody molecules using any suitable standard techniques such as proteolytic digestion or recombinant genetic engineering techniques involving the manipulation and expression of DNA encoding antibody variable and optionally constant domains. Such DNA is known and/or is readily available from, e.g., commercial sources, DNA libraries (including, e.g., phage-antibody libraries), or can be synthesized. The DNA can be sequenced and manipulated chemically or by using molecular biology techniques, for example, to arrange one or more variable and/or constant domains into a suitable configuration, or to introduce codons, create cysteine residues, modify, add or delete amino acids, etc.

[0284] Non-limiting examples of antigen-binding fragments include: (i) Fab fragments; (ii) F(ab′)2 fragments; (iii) Fd fragments; (iv) Fv fragments; (v) single-chain Fv (scFv) molecules; (vi) dAb fragments; and (vii) minimal recognition units consisting of the amino acid residues that mimic the hypervariable region of an antibody (e.g., an isolated complementarity determining region (CDR) such as a CDR3 peptide), or a constrained FR3-CDR3-FR4 peptide. Other engineered molecules, such as domain-specific antibodies, single domain antibodies, domain-deleted antibodies, chimeric antibodies, CDR-grafted antibodies, diabodies, triabodies, tetrabodies, minibodies, nanobodies (e.g., monovalent nanobodies, bivalent nanobodies, etc.), small modular immunopharmaceuticals (SMIPs), and shark variable IgNAR domains, are also encompassed within the expression “antigen-binding fragment,” as used herein.

[0285] An antigen-binding fragment of an antibody will typically comprise at least one variable domain. The variable domain can be of any size or amino acid composition and will generally comprise at least one CDR which is adjacent to or in frame with one or more framework sequences. In antigen-binding fragments having a VH domain associated with a VL domain, the VH and VL domains can be situated relative to one another in any suitable arrangement. For example, the variable region can be dimeric and contain VH-VH, VH-VL or VL-VL dimers. Alternatively, the antigen-binding fragment of an antibody can contain a monomeric VH or VL domain.

[0286] In certain embodiments, an antigen-binding fragment of an antibody can contain at least one variable domain covalently linked to at least one constant domain. Non-limiting, exemplary configurations of variable and constant domains that can be found within an antigen-binding fragment of an antibody of the present description include: (i) VH-CH1; (ii) VH-CH2; (iii) VH-CH3; (iv) VH-CH1-CH2; (V) VH-CH1-CH2-CH3; (vi) VH-CH2-CH3; (vii) VH-CL; (viii) VL-CH1; (ix) VL-CH2; (x) VL-CH3; (xi) VL-CH1-CH2; (xii) VL-CH1-CH2-CH3; (xiii) VL-CH2-CH3; and (xiv) VL-CL. In any configuration of variable and constant domains, including any of the exemplary configurations listed herein, the variable and constant domains can be either directly linked to one another or can be linked by a full or partial hinge or linker region. A hinge region can consist of at least 2 (e.g., 5, 10, 15, 20, 40, 60, or more) amino acids which result in a flexible or semi-flexible linkage between adjacent variable and/or constant domains in a single polypeptide molecule.

[0287] Moreover, an antigen-binding fragment of an antibody of the present description can comprise a homo-dimer or hetero-dimer (or other multimer) of any of the variable and constant domain configurations listed herein in non-covalent association with one another and/or with one or more monomeric VH or VL domain (e.g., by disulfide bond(s)).

[0288] As with full antibody molecules, antigen-binding fragments can be monospecific or multispecific (e.g., bispecific). A multispecific antigen-binding fragment of an antibody will typically comprise at least two different variable domains, wherein each variable domain is capable of specifically binding to a separate antigen or to a different epitope on the same antigen. Any multispecific antibody format, including the exemplary bispecific antibody formats disclosed herein, can be adapted for use in the context of an antigen-binding fragment of an antibody of the present description using routine techniques available in the art.

[0289] The antibodies of the present description can function through complement-dependent cytotoxicity (CDC) or antibody-dependent cell-mediated cytotoxicity (ADCC). “Complement-dependent cytotoxicity” (CDC) refers to lysis of antigen-expressing cells by an antibody of the description in the presence of complement. “Antibody-dependent cell-mediated cytotoxicity” (ADCC) refers to a cell-mediated reaction in which nonspecific cytotoxic cells that express Fc receptors (FcRs) (e.g., Natural Killer (NK) cells, neutrophils, and macrophages) recognize bound antibody on a target cell and thereby lead to lysis of the target cell. CDC and ADCC can be measured using assays that are well known and available in the art. (See, e.g., U.S. Pat. Nos. 5,500,362 and 5,821,337, and Clynes et al. (1998) Proc. Natl. Acad. Sci. (USA) 95:652-656). The constant region of an antibody is important in the ability of an antibody to fix complement and mediate cell-dependent cytotoxicity. Thus, the isotype of an antibody can be selected on the basis of whether it is desirable for the antibody to mediate cytotoxicity.

[0290] In certain embodiments, the antibodies of the description, e.g., anti-HER2 antibodies, or anti-HER2/HER2 bispecific antibodies, or anti-MET antibodies, or anti-MET/MET bispecific antibodies, or anti-STEAP2 antibodies, are human antibodies. The term “human antibody,” as used herein, is intended to include antibodies having variable and constant regions derived from human germline immunoglobulin sequences. The human antibodies of the description can include amino acid residues not encoded by human germline immunoglobulin sequences (e.g., mutations introduced by random or site-specific mutagenesis in vitro or by somatic mutation in vivo), for example in the CDRs and in particular CDR3. However, the term “human antibody,” as used herein, is not intended to include antibodies in which CDR sequences derived from the germline of another mammalian species, such as a mouse, have been grafted onto human framework sequences.

[0291] The antibodies can, in some embodiments, be recombinant human antibodies. The term “recombinant human antibody,” as used herein, is intended to include all human antibodies that are prepared, expressed, created or isolated by recombinant means, such as antibodies expressed using a recombinant expression vector transfected into a host cell (described further below), antibodies isolated from a recombinant, combinatorial human antibody library (described further below), antibodies isolated from an animal (e.g., a mouse) that is transgenic for human immunoglobulin genes (See, e.g., Taylor et al. (1992) Nucl. Acids Res. 20:6287-6295) or antibodies prepared, expressed, created or isolated by any other means that involves splicing of human immunoglobulin gene sequences to other DNA sequences. Such recombinant human antibodies have variable and constant regions derived from human germline immunoglobulin sequences. In certain embodiments, however, such recombinant human antibodies are subjected to in vitro mutagenesis (or, when an animal transgenic for human Ig sequences is used, in vivo somatic mutagenesis) and thus the amino acid sequences of the VH and VL regions of the recombinant antibodies are sequences that, while derived from and related to human germline VH and VL sequences, may not naturally exist within the human antibody germline repertoire in vivo.

[0292] Human antibodies can exist in two forms that are associated with hinge heterogeneity. In one form, an immunoglobulin molecule comprises a stable four chain construct of approximately 150-160 kDa in which the dimers are held together by an interchain heavy chain disulfide bond. In a second form, the dimers are not linked via inter-chain disulfide bonds and a molecule of about 75-80 kDa is formed composed of a covalently coupled light and heavy chain (half-antibody). These forms have been extremely difficult to separate, even after affinity purification. The frequency of appearance of the second form in various intact IgG isotypes is due to, but not limited to, structural differences associated with the hinge region isotype of the antibody. A single amino acid substitution in the hinge region of the human IgG4 hinge can significantly reduce the appearance of the second form (Angal et al. (1993) Molecular Immunology 30: 105) to levels typically observed using a human IgG1 hinge. The instant description encompasses antibodies having one or more mutations in the hinge, CH2 or CH3 region which can be desirable, for example, in production, to improve the yield of the desired antibody form.

[0293] The antibodies of the description can be isolated or purified antibodies. An “isolated antibody” or “purified antibody,” as used herein, means an antibody that has been identified and separated and/or recovered from at least one component of its natural environment. For example, an antibody that has been separated or removed from at least one component of an organism, or from a tissue or cell in which the antibody naturally exists or is naturally produced, is an “isolated antibody” for purposes of the present description. For example, an antibody that has been purified from at least one component of a reaction or reaction sequence, is a “purified antibody” or results from purifying the antibody. An isolated antibody also includes an antibody in situ within a recombinant cell. Isolated antibodies are antibodies that have been subjected to at least one purification or isolation step. According to certain embodiments, an isolated antibody or purified antibody can be substantially free of other cellular material and/or chemicals.

[0294] The antibodies disclosed herein can comprise one or more amino acid substitutions, insertions and/or deletions in the framework and/or CDR regions of the heavy and light chain variable domains as compared to the corresponding germline sequences from which the antibodies were derived. Such mutations can be readily ascertained by comparing the amino acid sequences disclosed herein to germline sequences available from, for example, public antibody sequence databases. The present description includes antibodies, and antigen-binding fragments thereof, which are derived from any of the amino acid sequences disclosed herein, wherein one or more amino acids within one or more framework and/or CDR regions are mutated to the corresponding residue(s) of the germline sequence from which the antibody was derived, or to the corresponding residue(s) of another human germline sequence, or to a conservative amino acid substitution of the corresponding germline residue(s) (such sequence changes are referred to herein collectively as “germline mutations”). A person of ordinary skill in the art, starting with the heavy and light chain variable region sequences disclosed herein, can easily produce numerous antibodies and antigen-binding fragments which comprise one or more individual germline mutations or combinations thereof. In certain embodiments, all of the framework and/or CDR residues within the VH and/or VL domains are mutated back to the residues found in the original germline sequence from which the antibody was derived. In other embodiments, only certain residues are mutated back to the original germline sequence, e.g., only the mutated residues found within the first 8 amino acids of FR1 or within the last 8 amino acids of FR4, or only the mutated residues found within CDR1, CDR2 or CDR3. In other embodiments, one or more of the framework and/or CDR residue(s) are mutated to the corresponding residue(s) of a different germline sequence (i.e., a germline sequence that is different from the germline sequence from which the antibody was originally derived).

[0295] Furthermore, the antibodies of the present description can contain any combination of two or more germline mutations within the framework and/or CDR regions, e.g., wherein certain individual residues are mutated to the corresponding residue of a particular germline sequence while certain other residues that differ from the original germline sequence are maintained or are mutated to the corresponding residue of a different germline sequence. Once obtained, antibodies and antigen-binding fragments that contain one or more germline mutations can be easily tested for one or more desired property such as, improved binding specificity, increased binding affinity, improved or enhanced antagonistic or agonistic biological properties (as the case may be), reduced immunogenicity, improved drug-to-antibody ratio (DAR) for antibody-drug conjugates, etc. Antibodies and antigen-binding fragments obtained in this general manner are encompassed within the present description.

[0296] The term “aglycosylated antibody” refers to an antibody that does not comprise a glycosylation sequence that might interfere with a transglutamination reaction, for instance an antibody that does not have saccharide group at N297 on one or more heavy chains. In particular embodiments, an antibody heavy chain has an N297 mutation. In other words, the antibody is mutated to no longer have an asparagine residue at position 297 according to the EU numbering system as disclosed by Kabat et al. In particular embodiments, an antibody heavy chain has an N297Q or an N297D mutation. Such an antibody can be prepared by site-directed mutagenesis to remove or disable a glycosylation sequence or by site-directed mutagenesis to insert a glutamine residue at site apart from any interfering glycosylation site or any other interfering structure. Such an antibody also can be isolated from natural or artificial sources. Aglycosylated antibodies also include antibodies comprising a T299 or S298P or other mutations, or combinations of mutations that result in a lack of glycosylation.

[0297] The term “deglycosylated antibody” refers to an antibody in which a saccharide group at is removed to facilitate transglutaminase-mediated conjugation. Saccharides include, but are not limited to, N-linked oligosaccharides. In some embodiments, deglycosylation is performed at residue N297. In some embodiments, removal of saccharide groups is accomplished enzymatically, included but not limited to via PNGase.

[0298] The term “epitope” refers to an antigenic determinant that interacts with a specific antigen binding site in the variable region of an antibody molecule known as a paratope. A single antigen can have more than one epitope. Thus, different antibodies can bind to different areas on an antigen and can have different biological effects. Epitopes can be either conformational or linear. A conformational epitope is produced by spatially juxtaposed amino acids from different segments of the linear polypeptide chain. A linear epitope is one produced by adjacent amino acid residues in a polypeptide chain. In certain circumstance, an epitope can include moieties of saccharides, phosphoryl groups, or sulfonyl groups on the antigen.

[0299] The terms “conjugated protein” or “conjugated antibody” as used herein refers to a protein or an antibody covalently linked to one or more chemical moieties. The chemical moiety can include an amine compound of the present disclosure. Linkers (LL) and payloads (P) suitable for use with the present disclosure are described in detail herein. In particular embodiments, a conjugated antibody comprising a therapeutic moiety is an antibody-drug conjugate (ADC), also referred to as an antibody-payload conjugate, or an antibody-linker-payload conjugate.

[0300] The term “Drug-to-Antibody Ratio” or (DAR) is the average number of therapeutic moieties, e.g., drugs, conjugated to a binding agent of the present disclosure.

[0301] The term “Linker Antibody Ratio” or (LAR), also denoted as the lower case I in some embodiments, is the average number of reactive primary amine compounds conjugated to a binding agent of the present disclosure. Such binding agents, e.g., antibodies, can be conjugated with primary amine compounds comprising, e.g., a suitable azide or alkyne. The resulting binding agent, which is functionalized with an azide or an alkyne can subsequently react with a therapeutic moiety comprising the corresponding azide or alkyne via the 1,3-cycloaddition reaction.

[0302] The phrase “pharmaceutically acceptable amount” refers to an amount effective or sufficient in treating, reducing, alleviating, or modulating the effects or symptoms of at least one health problem in a subject in need thereof. For example, a pharmaceutically acceptable amount of an antibody or antibody-drug conjugate is an amount effective for modulating a biological target using the antibody or antibody-drug-conjugates provided herein. Suitable pharmaceutically acceptable amounts include, but are not limited to, from about 0.001% up to about 10%, and any amount in between, such as about 0.01%, about 0.02%, about 0.03%, about 0.04%, about 0.05%, about 0.06%, about 0.07%, about 0.08%, about 0.09%, about 0.1%, about 0.2%, about 0.3%, about 0.4%, about 0.5%, about 0.6%, about 0.7%, about 0.8%, about 0.9%, about 1%, about 2%, about 3%, about 4%, about 5%, about 6%, about 7%, about 8%, about 9%, or about 10% of an antibody or antibody-drug-conjugate provided herein.

[0303] The phrase “reaction pH” refers to the pH of a reaction after all reaction components or reactants have been added.

[0304] The term “substantial identity” or “substantially identical,” when referring to a nucleic acid or fragment thereof, indicates that, when optimally aligned with appropriate nucleotide insertions or deletions with another nucleic acid (or its complementary strand), there is nucleotide sequence identity in at least about 95%, and more preferably at least about 96%, 97%, 98% or 99% of the nucleotide bases, as measured by any well-known algorithm of sequence identity, such as FASTA, BLAST or gap, as discussed below. A nucleic acid molecule having substantial identity to a reference nucleic acid molecule can, in certain instances, encode a polypeptide having the same or substantially similar amino acid sequence as the polypeptide encoded by the reference nucleic acid molecule.

[0305] As applied to polypeptides, the term “substantial similarity” or “substantially similar” means that two peptide sequences, when optimally aligned, such as by the programs gAP or BESTFIT using default gap weights, share at least 95% sequence identity, even more preferably at least 98% or 99% sequence identity. Preferably, residue positions which are not identical differ by conservative amino acid substitutions. A “conservative amino acid substitution” is one in which an amino acid residue is substituted by another amino acid residue having a side chain (R group) with similar chemical properties (e.g., charge or hydrophobicity). In general, a conservative amino acid substitution will not substantially change the functional properties of a protein. In cases where two or more amino acid sequences differ from each other by conservative substitutions, the percent sequence identity or degree of similarity can be adjusted upwards to correct for the conservative nature of the substitution. Means for making this adjustment are well-known to those of skill in the art. See, e.g., Pearson (1994) Methods Mol. Biol. 24: 307-331. Examples of groups of amino acids that have side chains with similar chemical properties include (1) aliphatic side chains: glycine, alanine, valine, leucine and isoleucine; (2) aliphatic-hydroxyl side chains: serine and threonine; (3) amide-containing side chains: asparagine and glutamine; (4) aromatic side chains: phenylalanine, tyrosine, and tryptophan; (5) basic side chains: lysine, arginine, and histidine; (6) acidic side chains: aspartate and glutamate, and (7) sulfur-containing side chains are cysteine and methionine. In some embodiments, conservative amino acids substitution groups are: valine-leucine-isoleucine, phenylalanine-tyrosine, lysine-arginine, alanine-valine, glutamate-aspartate, and asparagine-glutamine.

[0306] Alternatively, a conservative replacement is any change having a positive value in the PAM250 log-likelihood matrix disclosed in Gonnet et al. (1992) Science 256: 1443-1445. A “moderately conservative” replacement is any change having a nonnegative value in the PAM250 log-likelihood matrix.

[0307] Sequence similarity for polypeptides, which is also referred to as sequence identity, is typically measured using sequence analysis software. Protein analysis software matches similar sequences using measures of similarity assigned to various substitutions, deletions and other modifications, including conservative amino acid substitutions. For instance, gCG software contains programs such as gap and Bestfit which can be used with default parameters to determine sequence homology or sequence identity between closely related polypeptides, such as homologous polypeptides from different species of organisms or between a wild type protein and a mutein thereof. See, e.g., gCG Version 6.1. Polypeptide sequences also can be compared using FASTA using default or recommended parameters, a program in gCG Version 6.1. FASTA (e.g., FASTA2 and FASTA3) provides alignments and percent sequence identity of the regions of the best overlap between the query and search sequences (Pearson (2000) supra). Another particular algorithm when comparing a sequence of the description to a database containing a large number of sequences from different organisms is the computer program BLAST, especially BLASTP or TBLASTN, using default parameters. See, e.g., Altschul et al. (1990) J. Mol. Biol. 215:403-410 and Altschul et al. (1997) Nucleic Acids Res. 25:3389-402.

### Protein-Drug Conjugate Compounds

[0308] According to the foregoing objective and others, the present disclosure provides protein-drug conjugate compounds, e.g., antibody-drug conjugate compounds, and precursors and intermediates thereof, pharmaceutical compositions, and methods for treating certain diseases in a subject in need of such treatment. According to the disclosure, the protein-drug conjugate compounds provided herein comprise a glutaminyl-modified binding agent conjugated with a primary amine compound linked to a therapeutic moiety, e.g., camptothecin analog moiety, as described herein. Also provided are specific and efficient methods for producing protein-drug conjugates, e.g., antibody-drug conjugates, utilizing a combination of transglutaminase and 1,3-cycloaddition techniques. According to the disclosure, the protein-drug conjugate compounds provided herein comprise prodrugs of topoisomerase I inhibitor, e.g., prodrugs of Dxd.

[0309] In one aspect, the present disclosure provides an antibody or an antigen-binding fragment thereof conjugated to a compound having Formula (I)

[chemical structure]

or a pharmaceutically acceptable salt thereof,
[0310] wherein R¹, R², R³, and R⁴ are independently hydrogen, a C₁₋₅ alkyl, or aryl;
[0311] AA is a natural or a nonnatural amino acid;
[0312] p is an integer from 1 to 6, and

[chemical structure]

indicates the point of attachment to the antibody or the antigen-binding fragment thereof, directly or via a linker.

[0313] In one embodiment, the compound of Formula (I) is conjugated directly to the antibody or the antigen-binding fragment thereof.

[0314] In another embodiment, the compound of Formula (I) is conjugated to the antibody or the antigen-binding fragment thereof via a bivalent linker.

[0315] In one embodiment, p is 1. In another embodiment, p is 2, i.e., [AA]₂ is a peptide dimer of two amino acids. In another embodiment, p is 3. In another embodiment, p is 4. In another embodiment, p is 5. In another embodiment, p is 6. In any embodiment where p is greater than one, amino acids may be the same or different from each other. In one embodiment, p is 2 and the two amino acids are different from each other.

[0316] In one embodiment, p is 1 and the amino acid is a natural amino acid. In one embodiment, p is 1 and the natural amino acid is selected from glycine, alanine, valine, leucine, isoleucine, phenylalanine, tyrosine, threonine, lysine, asparagine, glutamine, aspartic acid, and glutamic acid. In one embodiment, p is 1 and the natural amino acid is selected from glycine, phenylalanine, threonine, lysine, glutamine, and glutamic acid.

[0317] In one embodiment, p is 1 and the amino acid is a nonnatural amino acid. In one embodiment, p is 1 and the nonnatural amino acid is selected from the group consisting of an R-amino acid, an N-methyl amino acid,

[chemical structure]

[0318] In another embodiment, p is 2, i.e., [AA]₂ is a peptide dimer of two amino acids. In one embodiment, p is 2 and both amino acids are glycines.

[0319] In one embodiment, R¹ is H.

[0320] In one embodiment, R² is H. In one embodiment, R³ is H. In one embodiment, R² and R³ are both Hs.

[0321] In one embodiment, R⁴ is H. In another embodiment, R⁴ is a C₁₋₅ alkyl. In one particular embodiment, R⁴ is a C₁ alkyl (a methyl).

[0322] In one embodiment, the compound of Formula (I) is referred to as a payload.

[0323] In one embodiment, the compound of Formula (I) comprises a compound selected from the group consisting of:

[chemical structure]

[chemical structure]

[chemical structure]

which is conjugated to the antibody or the antigen-binding fragment via the amino group.

[0324] In one embodiment, said antibody or said antigen-binding fragment thereof is conjugated to a compound having a structure according to Formula (II)

[chemical structure]

or a pharmaceutically acceptable salt thereof, wherein R¹, R², R³, and R⁴ are independently hydrogen or a C₁₋₅ alkyl;
[0325] A is a click chemistry adduct;
[0326] W is NH, O, CO, CH₂, a phenyl, or a combination of two or more thereof;
[0327] AA is a natural or a nonnatural amino acid;
[0328] m is an integer from 0 to 8;
[0329] n is 0 or 1;
[0330] p is an integer from 1 to 6, and

[chemical structure]

indicates the point of attachment to the antibody or the antigen-binding fragment thereof, directly or via a linker.

[0331] In one embodiment, the click chemistry adduct is a product of a copper-free click chemistry reaction selected from:
[0332] (a) strain-promoted azide/dibenzocyclooctyne-amine (DBCO) click chemistry;
[0333] (b) inverse electron demand Diels-Alder (IED-DA) tetrazine/trans-cyclooctene (TCO) click chemistry;
[0334] (c) inverse electron demand Diels-Alder (IED-DA) tetrazine/norbonene click chemistry;
[0335] (d) Diels-Alder maleimide/furan click-chemistry;
[0336] (e) Staudinger ligation; and
[0337] (f) nitrile-oxide/norbonene cycloaddition click chemistry.

[0338] In one non-limiting embodiment, the click chemistry adduct is a product of a strain-promoted azide/dibenzocyclooctyne-amine (DBCO) click chemistry reaction. In another embodiment, the click chemistry adduct is a product of inverse electron demand Diels-Alder (IED-DA) tetrazine/trans-cyclooctene (TCO) click chemistry reaction.

[0339] In one embodiment, the click chemistry adduct comprises a triazole. In another embodiment, the click chemistry adduct comprises a diazine.

[0340] In one embodiment, the click chemistry adduct is selected from the group consisting of:

[chemical structure]

[chemical structure]

and any regio-isomers or entantiomers thereof, where R′ is H or a C₁₋₃ alkyl and Z is C or N.

[0341] In one embodiment, the click chemistry adduct is

[chemical structure]

[0342] In one embodiment, R¹ is H.

[0343] In one embodiment, R² is H. In one embodiment, R³ is H. In one embodiment, R² and R³ are both Hs.

[0344] In one embodiment, R⁴ is H. In another embodiment, R⁴ is a C₁₋₅ alkyl. In one particular embodiment, R⁴ is a C₁ alkyl (a methyl).

[0345] In one embodiment, W is O. In one embodiment, W is NH. In one embodiment, W is CO. In one embodiment, W is CH₂. In one embodiment, W is a phenyl. In one embodiment, W is OCH₂. In one embodiment, W is —OCH₂—CO-NH—. In one embodiment, W is —O—CO—NH—. In one embodiment, W is

[chemical structure]

[0346] In one embodiment, m is 0. In another embodiment, m is 1. In another embodiment, m is 2. In another embodiment, m is 3. In another embodiment, m is 4. In another embodiment, m is 5. In another embodiment, m is 6. In another embodiment, m is 7. In another embodiment, m is 8.

[0347] In one particular embodiment, m is 4.

[0348] In one embodiment, n is 0. In another embodiment, n is 1.

[0349] In one embodiment, p is 1. In another embodiment, p is 2, i.e., [AA]₂ is a peptide dimer of two amino acids. In another embodiment, p is 3. In another embodiment, p is 4. In another embodiment, p is 5. In another embodiment, p is 6. In any embodiment where p is greater than one, amino acids may be the same or different from each other. In one embodiment, p is 2 and the two amino acids are different from each other.

[0350] In one embodiment, p is 1 and the amino acid is a natural amino acid. In one embodiment, p is 1 and the natural amino acid is selected from glycine, alanine, valine, leucine, isoleucine, phenylalanine, tyrosine, threonine, lysine, asparagine, glutamine, aspartic acid, and glutamic acid. In one embodiment, p is 1 and the natural amino acid is selected from glycine, phenylalanine, threonine, lysine, glutamine, and glutamic acid.

[0351] In one embodiment, p is 1 and the amino acid is a nonnatural amino acid. In one embodiment, p is 1 and the nonnatural amino acid is selected from the group consisting of an R-amino acid, an N-methyl amino acid,

[chemical structure]

[0352] In another embodiment, p is 2, i.e., [AA]₂ is a peptide dimer of two amino acids. In one embodiment, p is 2 and both amino acids are glycines.

[0353] In one embodiment, said compound of Formula (II) comprises a compound having structure selected from the group consisting of:

[chemical structure]

[chemical structure]

[chemical structure]

[chemical structure]

[chemical structure]

[0354] In one embodiment, said compound of Formula (II) comprises

[chemical structure]

[0355] In one aspect, presented herein is an antibody-drug conjugate having a structure according to Formula (III)

[chemical structure]

or a pharmaceutically acceptable salt thereof, wherein
[0356] Ab is an antibody or an antigen-binding fragment thereof;
[0357] R¹, R², R³, and R⁴ are independently hydrogen or a C₁₋₅ alkyl;
[0358] A is a click chemistry adduct;
[0359] W is NH, O, CO, CH₂, a phenyl, or a combination of two or more thereof;
[0360] LL is a linker or a bond connecting said Ab and said A;
[0361] AA is a natural or a nonnatural amino acid;
[0362] m is an integer from 0 to 8;
[0363] n is 0 or 1;
[0364] p is an integer from 1 to 6;
[0365] and q is an integer from 1 to 10.

[0366] In one embodiment, the click chemistry adduct is a product of a copper-free click chemistry reaction selected from:
[0367] (a) strain-promoted azide/dibenzocyclooctyne-amine (DBCO) click chemistry;
[0368] (b) inverse electron demand Diels-Alder (IED-DA) tetrazine/trans-cyclooctene (TCO) click chemistry;
[0369] (c) inverse electron demand Diels-Alder (IED-DA) tetrazine/norbonene click chemistry;
[0370] (d) Diels-Alder maleimide/furan click-chemistry;
[0371] (e) Staudinger ligation; and
[0372] (f) nitrile-oxide/norbonene cycloaddition click chemistry.

[0373] In one non-limiting embodiment, the click chemistry adduct is a product of a strain-promoted azide/dibenzocyclooctyne-amine (DBCO) click chemistry reaction. In another embodiment, the click chemistry adduct is a product of inverse electron demand Diels-Alder (IED-DA) tetrazine/trans-cyclooctene (TCO) click chemistry reaction.

[0374] In one embodiment, the click chemistry adduct comprises a triazole. In another embodiment, the click chemistry adduct comprises a diazine.

[0375] In one embodiment, the click chemistry adduct is selected from the group consisting of:

[chemical structure]

[chemical structure]

where R′ is H or a C₁₋₃ alkyl and Z is C or N.

[0376] In one embodiment, the click chemistry adduct is

[chemical structure]

[0377] In one embodiment, R¹ is H.

[0378] In one embodiment, R² is H. In one embodiment, R³ is H. In one embodiment, R² and R³ are both Hs.

[0379] In one embodiment, R⁴ is H. In another embodiment, R⁴ is a C₁₋₅ alkyl. In one particular embodiment, R⁴ is a C₁ alkyl (a methyl).

[0380] In one embodiment, m is 0. In another embodiment, m is 1. In another embodiment, m is 2. In another embodiment, m is 3. In another embodiment, m is 4. In another embodiment, m is 5. In another embodiment, m is 6. In another embodiment, m is 7. In another embodiment, m is 8.

[0381] In one particular embodiment, m is 4.

[0382] In one embodiment, n is 0. In another embodiment, n is 1.

[0383] In one embodiment, p is 1. In another embodiment, p is 2, i.e., [AA]₂ is a peptide dimer of two amino acids. In another embodiment, p is 3. In another embodiment, p is 4. In another embodiment, p is 5. In another embodiment, p is 6. In any embodiment where p is greater than one, amino acids may be the same or different from each other. In one embodiment, p is 2 and the two amino acids are different from each other.

[0384] In one embodiment, p is 1 and the amino acid is a natural amino acid. In one embodiment, p is 1 and the natural amino acid is selected from glycine, alanine, valine, leucine, isoleucine, phenylalanine, tyrosine, threonine, lysine, asparagine, glutamine, aspartic acid, and glutamic acid. In one embodiment, p is 1 and the natural amino acid is selected from glycine, phenylalanine, threonine, lysine, glutamine, and glutamic acid.

[0385] In one embodiment, p is 1 and the amino acid is a nonnatural amino acid. In one embodiment, p is 1 and the nonnatural amino acid is selected from the group consisting of an R-amino acid, an N-methyl amino acid,

[chemical structure]

[0386] In another embodiment, p is 2, i.e., [AA]₂ is a peptide dimer of two amino acids. In one embodiment, p is 2 and both amino acids are glycines.

[0387] In one embodiment, LL is a bivalent or a multivalent linker selected from the group consisting of

[chemical structure]

[chemical structure]

[chemical structure]

[chemical structure]

[chemical structure]

[chemical structure]

wherein (B′) is a point of attachment click chemistry adduct A and n is 0, 1, 2, 3, 4, 5, 6, 7, 8, 9, 10, 11, 12, 13, 14, or 15.

[0388] In one embodiment, LL is a bivalent or a multivalent linker selected from the group consisting of

[chemical structure]

[chemical structure]

where n is 0,1, 2,3, 4, 5,6, 7, 8,9,10, 11, 12,13, 14, or 15.

[0389] In one embodiment, LL is a bivalent or a multivalent linker selected from the group consisting of

[chemical structure]

where n is 0, 1, 2, 3, 4, 5, 6, 7, 8, 9, 10, 11, 12, 13, 14, or 15.

[0390] In some embodiments, the linker comprises a self-immolative group. A self-immolative group, a self-immolative linker, or a self-immolative spacer, can be any such group known to those of skill in the art. Self-immolative linker displays an important role in the cascade mechanism of release of the compound linked. It is defined as a covalent group, which has the role of cleavaging two bonds between a protector group and a drug, in the case of drug delivery systems, after a stimuli. The stimuli may include enzyme triggers, chemical triggers, as pH, redox system, 1,4-, 1,6-, 1,8-eliminations, photodegradable triggers, multiple triggers, among others. The cascade of reactions of the self-immolative structural construct allows to control the release of a drug. In exemplary embodiments, the self-immolative group is p-aminobenzyl (PAB) or a derivative thereof. Useful derivatives include p-aminobenzyloxycarbonyl (PABC). Those of skill in the art will recognize that a self-immolative group is capable of carrying out a chemical reaction which releases the remaining atoms of a linker from a payload.

[0391] In one embodiment, q is 1. In another embodiment, q is 2. In another embodiment, q is 3. In another embodiment, q is 4. In another embodiment, q is 5. In another embodiment, q is 6. In another embodiment, q is 7. In another embodiment, q is 8. In another embodiment, q is 9. In another embodiment, q is 10.

[0392] In one embodiment, presented herein is an antibody-drug conjugate having a structure

[chemical structure]

[0393] or a pharmaceutically acceptable salt thereof, wherein
[0394] Ab is an antibody or an antigen-binding fragment thereof;
[0395] R is a side chain of any natural or nonnatural amino acid; and
[0396] n is an integer from 1 to 5.

[0397] In another embodiment, presented herein is an antibody-drug conjugate having a structure

[chemical structure]

[chemical structure]

[chemical structure]

[chemical structure]

[chemical structure]

or a pharmaceutically acceptable salt thereof, wherein
[0398] Ab is an antibody or an antigen-binding fragment thereof; and
[0399] n is an integer from 1 to 5.

[0400] In one embodiment, presented herein is an antibody-drug conjugate having a structure

[chemical structure]

or a pharmaceutically acceptable salt thereof, wherein
[0401] Ab is an antibody or an antigen-binding fragment thereof; and
[0402] n is an integer from 1 to 5..

[0403] In one aspect, presented herein is an antibody-drug conjugate having a structure according to Formula (IVa or IVb):

[chemical structure]

[chemical structure]

or a pharmaceutically acceptable salt thereof, wherein
[0404] Ab is an antibody or an antigen-binding fragment thereof;
[0405] R is a side chain of any natural or non-natural amino acid;
[0406] and n is an integer from 1 to 5.

[0407] In another aspect, the present disclosure provides an antibody-drug conjugate having a structure according to Formula (IVc, IVd, IVe, IVf, IVg, IVh, IVi, IVj, or IVk)

[chemical structure]

[chemical structure]

[chemical structure]

[chemical structure]

[chemical structure]

[chemical structure]

[chemical structure]

[chemical structure]

[chemical structure]

[0408] or a pharmaceutically acceptable salt thereof, wherein
[0409] Ab is an antibody or an antigen-binding fragment thereof;
[0410] R is a side chain of any natural or nonnatural amino acid;
[0411] and n is an integer from 1 to 5.

[0412] In one embodiment, R is a hydrogen.

[0413] In one embodiment, R is a side chain of a natural amino acid. In one embodiment, R is a side chain of a natural amino acid selected from glycine, alanine, valine, leucine, isoleucine, phenylalanine, tyrosine, threonine, lysine, asparagine, glutamine, aspartic acid, and glutamic acid. In one embodiment, R is a side chain of a natural amino acid selected from glycine, phenylalanine, threonine, lysine, glutamine, and glutamic acid.

[0414] In one embodiment, R is a side chain of a nonnatural amino acid. In one embodiment, R is a side chain of a nonnatural amino acid selected from the group consisting of an R-amino acid, an N-methyl amino acid,

[chemical structure]

[0415] In one embodiment of any of the above, said antibody or said antigen-binding fragment thereof comprises Gln295 and/or Gln297 (i.e., a glutamine residue in position 295 and/or 297), and the payload (e.g., a prodrug of DXd) is conjugated to said antibody or antigen-binding fragment through the side chains of Gln295 and/or Gln297, directly or via a linker.

### Payloads

[0416] In certain embodiments, the payloads of the present disclosure are prodrugs of a topoisomerase I inhibitor. In certain embodiments, the payloads of the present disclosure are camptothecin analogs and/or derivatives.

[chemical structure]

### Camptothecin

[0417] Camptothecin (CPT), shown above, is a topoisomerase poison. It was discovered in 1966 by M. E. Wall and M. C. Wani in systematic screening of natural products for anticancer drugs. It was isolated from the bark and stem of Camptotheca acuminata (Camptotheca, Happy tree), a tree native to China used as a cancer treatment in Traditional Chinese Medicine. Camptothecin showed remarkable anticancer activity in preliminary clinical trials. However, it has low solubility, so synthetic and medicinal chemists have developed numerous syntheses of camptothecin and various derivatives to increase the benefits of the chemical, with good results. Four camptothecin analogs have been approved and are used in cancer chemotherapy today: topotecan, irinotecan, belotecan, and deruxtecan (Dxd).

[0418] Trastuzumab deruxtecan (T-Dxd) is an antibody-drug conjugate that includes a human epidermal growth factor receptor 2 (HER2)-directed antibody trastuzumab and a topoisomerase I inhibitor conjugate deruxtecan (Dxd, a derivative of exatecan). It was approved for use in the United States in December 2019. Exatecan, shown below, is a camptothecin analog.

[chemical structure]

### Exatecan, Left, and Deruxtecan (Dxd), Right

[0419] In one embodiment, the payload of the present disclosure is a prodrug of deruxtecan (Dxd).

[0420] In certain embodiments, the payload of the present disclosure is a compound having the structure P-I:

[chemical structure]

wherein R¹, R², R³, and R⁴ are independently hydrogen or a C₁₋₅ alkyl;
[0421] AA is a natural or a nonnatural amino acid; and
[0422] p is an integer from 1 to 6, or a pharmaceutically acceptable salt thereof.

[0423] In one embodiment, p is 1. In another embodiment, p is 2, i.e., [AA]₂ is a peptide dimer of two amino acids. In another embodiment, p is 3. In another embodiment, p is 4. In another embodiment, p is 5. In another embodiment, p is 6. In any embodiment where p is greater than one, amino acids may be the same or different from each other. In one embodiment, p is 2 and the two amino acids are different from each other.

[0424] In one embodiment, p is 1 and the amino acid is a natural amino acid. In one embodiment, p is 1 and the natural amino acid is selected from glycine, alanine, valine, leucine, isoleucine, phenylalanine, tyrosine, threonine, lysine, asparagine, glutamine, aspartic acid, and glutamic acid. In one embodiment, p is 1 and the natural amino acid is selected from glycine, phenylalanine, threonine, lysine, glutamine, and glutamic acid.

[0425] In one embodiment, p is 1 and the amino acid is a nonnatural amino acid. In one embodiment, p is 1 and the nonnatural amino acid is selected from the group consisting of an R-amino acid, an N-methyl amino acid,

[chemical structure]

[0426] In another embodiment, p is 2, i.e., [AA]₂ is a peptide dimer of two amino acids. In one embodiment, p is 2 and both amino acids are glycines.

[0427] In one embodiment, R¹ is H.

[0428] In one embodiment, R² is H. In one embodiment, R³ is H. In one embodiment, R² and R³ are both Hs.

[0429] In one embodiment, R⁴ is H. In another embodiment, R⁴ is a C₁₋₅ alkyl. In one particular embodiment, R⁴ is a C₁ alkyl (a methyl).

[0430] In one embodiment, the compound of Formula (I) is selected from the group consisting of the compounds of Table 1.

TABLE 1
Structures of EXT, DXd, and the prodrugs of DXd according to embodiments of the
present disclosure

| | | | | | | | MS |
|---|---|---|---|---|---|---|---|
| | | | | | | HPLC | (M + |
| Cpd# | Structures | cLogP | MF | MW | Salt | purity | H) |
| Exa- tecan (EXT) | [chemical structure] | 1.45 | C₂₄H₂₂FN₃O₄ | 435.46 | MsOH | 97 | 436.1 |
| DXd | [chemical structure] | 0.55 | C₂₆H₂₄FN₃O₆ | 493.49 | NA | 99 | 494.1 |
| P1 | [chemical structure] | −0.60 | C₂₉H₃₀FN₅O₇ | 579.59 | TFA | 99 | 580.2 |
| P2 | [chemical structure] | −1.08 | C₃₀H₃₂FN₅O₈ | 609.61 | TFA | 95 | 610.2 |
| P3 | [chemical structure] | −1.19 | C₃₂H₃₅FN₆O₈ | 650.66 | NA | 99 | 651.3 |
| P4 | [chemical structure] | −2.65 | C₃₂H₃₄FN₅O₉ | 651.65 | NA | 95 | 652.2 |
| P5 | [chemical structure] | −0.36 | C₃₃H₃₉FN₆O₇ | 650.71 | TFA | 99 | 651.3 |
| P6 | [chemical structure] | 0.76 | C₃₃H₃₇FN₈O₇ | 676.71 | NA | 99 | 677.3 |
| P7 | [chemical structure] | 1.62 | C₃₆H₃₆FN₅O₇ | 669.71 | NA | 99 | 670.2 |
| P8 | [chemical structure] | −1.71 | C₃₁H₃₃FN₆O₈ | 636.64 | TFA | 99 | 637.3 |
| P9 | [chemical structure] | −0.38 | C₃₀H₃₂FN₅O₇ | 593.61 | TFA | 98 | 594.2 |
| P11 | [chemical structure] | 0.40 | C₃₁H₃₄FN₅O₇ | 607.64 | TFA | 100 | 607.6 |
| P12 | [chemical structure] | 1.62 | C₃₆H₃₆FN₅O₇ | 669.71 | TFA | 98 | 670.2 |

[0431] Certain properties of the payloads according to the present disclosure are summarized in Table 2, below.

TABLE 2
SAR of ProDrugs of DXd (R1,R2,R3 = H)

[chemical structure]

| | | | | | | | Human plasma | | | | |
|---|---|---|---|---|---|---|---|---|---|---|---|
| | | | | | | | stability | | Mouse blood stability | | |
| | | | | HCT-15 EC₅₀ | | SKBR | | % | | % | DXd |
| Cpd | Structure | | cLog | (nM) | | 3 EC₅₀ | T1/2 | Remaining | T1/2 | Remaining | released at |
| # | AA | R4 | P | −v | +v | (nM) | (h) | at 24 h | (h) | at 24 h | 24 h |
| EXT | | | 1.45 | 1.22 | 1.13 | 0.52 | | | | | |
| DXd | | | 0.55 | 7.99 | 4.18 | 1.63 | | | 62.65 | 94.8% | |
| P1 | Gly | H | −0.60 | 49.85 | 18.16 | 9.52 | 49.6 | 72.4 | 0.63 | 4.1% | 37.4% |
| P2 | Ser | H | −1.08 | 61.65 | 31.88 | 5.89 | 65.4 | 80.4 | 2.5 | 34.1% | 40.3% |
| P3 | Gln | H | −1.19 | 120.45 | 65.07 | 11.6 | 24.1 | 48.9 | 1.0 | 6.5% | 15.8% |
| P4 | Glu | H | −2.65 | 78.09 | 65.34 | 6.63 | 107 | 90.4 | 9.2 | 66.1% | 10.8% |
| P5 | Lys | H | −0.36 | 25.14 | 20.39 | 4.51 | 49.4 | 69.7 | 0.4 | 1.3% | 55.3% |
| P6 | Lys(N₃) | H | 0.76 | 7.74 | 3.18 | 2.06 | 28.2 | 59.0 | 0.2 | 3.3% | 37.3% |
| P7 | Phe | H | 1.62 | 12.68 | 4.55 | 1.98 | 24.4 | 51.3 | 0.2 | 6.3% | 40.1% |
| P8 | Gly-Gly | H | −1.71 | 142.12 | 125.46 | 30.82 | 144 | 86.0 | 2.9 | 46.9% | 21.8% |
| P9 | Gly | Me | −0.38 | 193.71 | 99.73 | 69.50 | | | | | |
| P11 | COCMe₂NH₂ | H | 0.40 | 166.47 | 66.82 | 27.68 | | | | | |
| P12 | D-Phe | H | 1.62 | 94.37 | 32.00 | 15.35 | | | | | |

[0432] The present disclosure also relates to a pharmaceutical composition comprising a therapeutically effective amount of the payload as described above or a pharmaceutically acceptable salt thereof and one or more pharmaceutically acceptable carriers, diluents, or excipients.

[0433] The present disclosure also relates to a process for manufacturing a linker-payload compound having the formula (D′)-(G′)

[chemical structure]

[chemical structure]

[chemical structure]

[chemical structure]

or a pharmaceutically acceptable salt thereof,
[0434] wherein R¹, R², R³, and R⁴ are independently hydrogen or a C₁₋₅ alkyl;
[0435] B is selected from the group consisting of

[chemical structure]

W is NH, O, CO, CH₂, a phenyl, or a combination of two or more thereof; and R⁵, R⁶, R⁷ and R⁸ are independently hydrogen, —NH₂, or a side chain of any natural or non-natural amino acid,
[0436] the method comprising a step of exposing a payload having an amino group to an activated intermediate having a para-nitro-phenyl carbonate in the presence of a base and a coupling catalyst to afford said linker-payload compound (D′)-(G′), wherein said coupling catalyst is 4-Hydroxy-2-methylquinoline (MeHYQ).

[0437] The present disclosure also relates to process for manufacturing a linker-payload compound having the formula (D-1)

[chemical structure]

or a pharmaceutically acceptable salt thereof,
[0438] wherein R¹, R², R³, and R⁴ are independently hydrogen or a C₁₋₅ alkyl, and
[0439] R⁵ and R⁶ are independently hydrogen, —NH₂, or a side chain of any natural or non-natural amino acid,
[0440] the method comprising a step of exposing a payload having an amino group to an activated intermediate having a para-nitro-phenyl carbonate in the presence of a base and a coupling catalyst to afford said linker-payload compound (D-1), wherein said coupling catalyst is 4-Hydroxy-2-methylquinoline (MeHYQ).

[0441] In one embodiment, the payload having an amino group has a structure according to Formula P-I:

[chemical structure]

wherein R¹, R², R³, and R⁴ are independently hydrogen or a C₁₋₅ alkyl;
[0442] AA is a natural or a nonnatural amino acid; and
[0443] p is an integer from 1 to 6, or a pharmaceutically acceptable salt thereof.

[0444] In one embodiment, the amino group of the payload is the amino terminal of the AA.

[0445] In one embodiment, the activated intermediate having a para-nitro-phenyl carbonate has a structure according to formula I-I:

[chemical structure]

[0446] The present disclosure also relates to a process for manufacturing a linker-payload compound having the formula (D-1)

[chemical structure]

[0447] or a pharmaceutically acceptable salt thereof,
[0448] wherein R¹, R², R³, and R⁴ are independently hydrogen or a C₁₋₅ alkyl, and
[0449] R⁵ and R⁶ are independently hydrogen, —NH₂, or a side chain of any natural or non-natural amino acid,
[0450] said process comprising:
[0451] (a) providing a compound of Formula (1-1) having the structure:

[chemical structure]

where
[0452] X is selected from the group consisting of

[chemical structure]

and
[0453] (b) reacting the compound of Formula (1-1) with a compound of Formula (P-I):

[chemical structure]

[0454] wherein
[0455] R is H or PG; and
[0456] PG is a suitable protecting group;
[0457] to produce the compound of Formula (D-1).

[0458] In one embodiment, the compound of Formula (D-1) has the following structure:

[chemical structure]

[0459] In one embodiment, the step (b) of reacting the compound of Formula (1-1) with the compound of Formula (P-I) further comprises reacting the compound of Formula (P-I), wherein R is PG, with a protecting group removing agent prior to said reacting with the compound of Formula (1-1).

[0460] In one embodiment, the PG is selected from the group consisting of allyloxycarbonyl (Alloc), benzyloxycarbonyl (Cbz), tert-butyloxycarbonyl (Boc), and 9-fluorenylmethoxycarbonyl (Fmoc).

[0461] In one embodiment, the protecting group removing agent is selected from the group consisting of Pd(PPh)₃, PhSiH₃, H₂, piperidine, and trifluoroacetic acid (TFA).

[0462] In one embodiment, the compound of Formula (1-1) has the following structure:

[chemical structure]

[0463] In one embodiment, the compound of Formula (P-I) has the following structure:

[chemical structure]

[0464] In one embodiment, the process for manufacturing a linker-payload compound having the formula (D-1) further comprises the steps of providing a compound of Formula (V) having the structure:

[chemical structure]

and forming the compound of Formula (1-1) from the compound of Formula (V) prior to the step (a).

[0465] In one embodiment, the step of forming the compound of Formula (1-1) comprises reacting the compound of Formula (V) with a compound of Formula (VIa) or Formula (VIb):

[chemical structure]

[0466] where X′ is halogen, to produce the compound of Formula (1-1).

[0467] In one embodiment, the compound of Formula (VIa) is selected from the group consisting of

[chemical structure]

[0468] In one embodiment, the compound of Formula (VIb) is

[chemical structure]

[0469] In one embodiment, the process further comprises providing a compound of Formula (VII) having the structure:

[chemical structure]

wherein PG¹ is a suitable protecting group protecting group, and forming the compound of Formula (V) from the compound of Formula (VII).

[0470] In one embodiment, the PG¹ is selected from the group consisting of allyloxycarbonyl (Alloc), benzyloxycarbonyl (Cbz), tert-butyloxycarbonyl (Boc), and 9-fluorenylmethoxycarbonyl (Fmoc).

[0471] In one embodiment, the compound of Formula (VII) has the following structure:

[chemical structure]

[0472] In one embodiment, the step of forming the compound of Formula (V) comprises reacting the compound of Formula (VII) with a compound of Formula (VIII):

[chemical structure]

to produce the compound of Formula (V).

[0473] In one embodiment, the process further comprising the steps of providing a compound of Formula (IX) having the structure:

[chemical structure]

and forming the compound of Formula (VII) from the compound of Formula (IX).

[0474] In one embodiment, the compound of Formula (IX) has the following structure:

[chemical structure]

[0475] In one embodiment, the step of forming the compound of Formula (VII) comprises reacting the compound of Formula (IX) with a compound of Formula (X):

[chemical structure]

to produce the compound of Formula (VII).

[0476] In one embodiment, the process further comprises the steps of providing a compound of Formula (XI) having the structure:

[chemical structure]

and forming the compound of Formula (IX) from the compound of Formula (XI).

[0477] In one embodiment, the compound of Formula (XI) has the following structure:

[chemical structure]

[0478] In one embodiment, the step of forming the compound of Formula (IX) comprises reacting the compound of Formula (XI) with a compound of Formula (XII):

[chemical structure]

to produce the compound of Formula (IX).

[0479] In one embodiment, the process further comprises providing a compound of Formula (XIII) having the structure:

[chemical structure]

and
[0480] forming the compound of Formula (VIII) from the compound of Formula (XIII).

[0481] In one embodiment, the step of forming the compound of Formula (VIII) comprises reacting the compound of Formula (XIII) with a compound of Formula (XII):

[chemical structure]

to produce the compound of Formula (VIII).

[0482] In one embodiment, the process further comprises the steps of providing a compound of Formula (XIV) having the structure:

[chemical structure]

wherein R^{a} is halogen;
[0483] R^{b} is C₁₋₆ alkyl; and forming the compound of Formula (XIII) from the compound of Formula (XIV).

[0484] In one embodiment, R^{a} is bromine.

[0485] In one embodiment, the compound of Formula (XIV) has the following structure:

[chemical structure]

[0486] In one embodiment, the step of forming the compound of Formula (XIII) comprises reacting the compound of Formula (XIV) with a base to produce the compound of Formula (XIII).

[0487] In one embodiment, the base is selected from the group consisting of sodium methoxide (NaOMe), potassium tert-butoxide (t-BuOK), sodium hydride (NaH), and lithium diisopropylamide (LDA)

[0488] In one embodiment, the reaction between the compound of Formula (XIV) and a base is carried out in a suitable solvent, such as methanol (MeOH), tetrahydrofuran (THF), dimethylformamide (DMF), or a mixture thereof.

[0489] In one embodiment, the process further comprises the steps of providing a compound of Formula (XV) having the structure:

[chemical structure]

and
[0490] forming the compound of Formula (XIV) from the compound of Formula (XV).

[0491] In one embodiment, the compound of Formula (XV) has the following structure:

[chemical structure]

[0492] In one embodiment, the step of forming the compound of Formula (XIV) comprises reacting the compound of Formula (XV) with a compound of Formula (XVI):

[chemical structure]

to produce the compound of Formula (XIV).

[0493] In one embodiment, the compound of Formula (XV) is reacted with methyl glycolate in the presence of AgOTf to produce the compound of Formula (XIV).

[0494] In one embodiment, the process further comprises the steps of providing a compound of Formula (XVII) having the structure:

[chemical structure]

and forming the compound of Formula (XV) from the compound of Formula (XVII).

[0495] In one embodiment, the step of forming the compound of Formula (XV) comprises reacting the compound of Formula (XVII) with a bromination agent to produce the compound of Formula (XVII).

[0496] In one embodiment, the bromination agent is CHBr₃.

[0497] In one embodiment, the compound of Formula (XVII) is reacted with CHBr₃ in a non-polar solvent in the presence of a base, such as potassium tert-butoxide (t-BuOK).

[0498] In one embodiment, the process further comprises the steps of providing a compound of Formula (XVIII) having the structure:

[chemical structure]

and forming the compound of Formula (P-I) from the compound of Formula (XVIII).

[0499] In one embodiment, the compound of Formula (XVIII) has the following structure:

[chemical structure]

[0500] In one embodiment, the step of forming the compound of Formula (P-I) comprises reacting the compound of Formula (XVIII) with a compound of Formula (XIX):

[chemical structure]

to produce the compound of Formula (P-I).

[0501] In one embodiment, the process further comprises the steps of providing a compound of Formula (XX) having the structure:

[chemical structure]

and forming the compound of Formula (XVIII) from the compound of Formula (XX).

[0502] In one embodiment, the compound of Formula (XX) has the following structure:

[chemical structure]

[0503] In one embodiment, the step of forming the compound of Formula (XVIII) comprises reacting the compound of Formula (XX) with a compound of Formula (XXI):

[chemical structure]

to produce the compound of Formula (XVIII).

[0504] In one embodiment, the process further comprises the steps of providing a compound of Formula (XXII) having the structure:

[chemical structure]

and forming the compound of Formula (XX) from the compound of Formula (XXII).

[0505] In one embodiment, the compound of Formula (XXII) has the following structure:

[chemical structure]

[0506] The present disclosure also relates to a process for preparation of a compound of Formula (1-1):

[chemical structure]

[0507] or a pharmaceutically acceptable salt thereof,
[0508] where
[0509] X is selected from the group consisting of

[chemical structure]

[0510] said process comprising:
[0511] (a) providing a compound of Formula (V) having the structure:

[chemical structure]

and
[0512] (b) forming the compound of Formula (1-1) from the compound of Formula (V).

[0513] In one embodiment, the compound of Formula (1-1) has the following structure:

[chemical structure]

[0514] In one embodiment, step (b) of forming the compound of Formula (1-1) comprises reacting the compound of Formula (V) with a compound of Formula (VIa) or Formula (VIb):

[chemical structure]

[0515] where X′ is halogen,
[0516] to produce the compound of Formula (1-1).

[0517] In one embodiment, the compound of Formula (VIa) is selected from the group

[chemical structure]

[0518] In one embodiment, the compound of Formula (VIb) is

[chemical structure]

[0519] In one embodiment, the process further comprises the steps of providing a compound of Formula (VII) having the structure:

[chemical structure]

[0520] wherein PG¹ is a suitable protecting group protecting group, and
[0521] forming the compound of Formula (V) from the compound of Formula (VII).

[0522] In one embodiment, the compound of Formula (VII) has the following structure:

[chemical structure]

[0523] In one embodiment, the step of forming the compound of Formula (V) comprises reacting the compound of Formula (VII) with a compound of Formula (VIII):

[chemical structure]

to produce the compound of Formula (V).

[0524] In one embodiment, the process further comprises the steps of providing a compound of Formula (IX) having the structure:

[chemical structure]

and forming the compound of Formula (VII) from the compound of Formula (IX).

[0525] In one embodiment, the compound of Formula (IX) has the following structure:

[chemical structure]

[0526] In one embodiment, the step of forming the compound of Formula (VII) comprises reacting the compound of Formula (IX) with a compound of Formula (X):

[chemical structure]

to produce the compound of Formula (VII).

[0527] In one embodiment, the process further comprises the steps of providing a compound of Formula (XI) having the structure:

[chemical structure]

and forming the compound of Formula (IX) from the compound of Formula (XI).

[0528] In one embodiment, the compound of Formula (XI) has the following structure:

[chemical structure]

[0529] In one embodiment, the step of forming the compound of Formula (IX) comprises reacting the compound of Formula (XI) with a compound of Formula (XII):

[chemical structure]

to produce the compound of Formula (IX).

[0530] The present disclosure also relates to a process for preparation of a compound of Formula (XVIII):

[chemical structure]

[0531] or a pharmaceutically acceptable salt thereof,
[0532] wherein R¹, R², R³, and R⁴ are independently hydrogen or a C₁₋₅ alkyl, and
[0533] R⁵ and R⁶ are independently hydrogen, —NH₂, or a side chain of any natural or non-natural amino acid. This process comprises:
[0534] (a) providing a compound of Formula (XX) having the structure:

[chemical structure]

and
[0535] (b) forming the compound of Formula (XVIII) from the compound of Formula (XX).

[0536] In one embodiment, the compound of Formula (XVIII) has the following structure:

[chemical structure]

[0537] In one embodiment, the compound of Formula (XX) has the following structure:

[chemical structure]

[0538] In one embodiment, the step of forming the compound of Formula (XVIII) comprises reacting the compound of Formula (XX) with a compound of Formula (XXI):

[chemical structure]

to produce the compound of Formula (XVIII).

[0539] In one embodiment, the process further comprises the steps of providing a compound of Formula (XXII) having the structure:

[chemical structure]

and forming the compound of Formula (XX) from the compound of Formula (XXII).

[0540] In one embodiment, the compound of Formula (XXII) has the following structure:

[chemical structure]

[0541] The present disclosure also relates to a process for preparation of a compound of Formula (D-1):

[chemical structure]

[0542] or a pharmaceutically acceptable salt thereof,
[0543] wherein R¹, R², R³, and R⁴ are independently hydrogen or a C₁₋₅ alkyl, and
[0544] R⁵ and R⁶ are independently hydrogen, —NH₂, or a side chain of any natural or non-natural amino acid. This process comprises:
[0545] (a) providing a compound of Formula (1-1) having the structure:

[chemical structure]

wherein
[0546] X is selected from the group consisting of

[chemical structure]

and
[0547] (b) reacting the compound of Formula (1-1) with a compound of Formula (P-I):

[chemical structure]

[0548] wherein
[0549] R is H or PG; and
[0550] PG is a suitable protecting group,
[0551] to produce the compound of Formula (D-1).

[0552] In one embodiment, the compound of Formula (D-1) has the following structure:

[chemical structure]

[0553] In one embodiment, the compound of Formula (1-1) has the following structure:

[chemical structure]

[0554] In one embodiment, the step (b) of reacting the compound of Formula (1-1) with the compound of Formula (P-I) further comprises reacting the compound of Formula (P-I), wherein R is PG, with a protecting group removing agent prior to said reacting with the compound of Formula (1-1).

[0555] In one embodiment, the PG is selected from the group consisting of allyloxycarbonyl (Alloc), benzyloxycarbonyl (Cbz), tert-butyloxycarbonyl (Boc), and 9-fluorenylmethoxycarbonyl (Fmoc).

[0556] In one embodiment, the protecting group removing agent is selected from the group consisting of Pd(PPh)₃, PhSiH₃, H₂, piperidine, and trifluoroacetic acid (TFA).

[0557] In one embodiment, the compound of Formula (P-I) has the following structure:

[chemical structure]

[0558] In one embodiment, the process further comprises the steps of providing a compound of Formula (XVIII) having the structure:

[chemical structure]

and forming the compound of Formula (P-I) from the compound of Formula (XVIII).

[0559] In one embodiment, the compound of Formula (XVIII) has the following structure:

[chemical structure]

[0560] In one embodiment, the step of forming the compound of Formula (P-I) comprises reacting the compound of Formula (XVIII) with a compound of Formula (XIX):

[chemical structure]

to produce the compound of Formula (P-I).

[0561] The present disclosure also relates to a process for preparation of a compound of Formula (D-1):

[chemical structure]

or a pharmaceutically acceptable salt thereof,
[0562] wherein R¹, R², R³, and R⁴ are independently hydrogen or a C₁₋₅ alkyl, and
[0563] R⁵ and R⁶ are independently hydrogen, —NH₂, or a side chain of any natural or non-natural amino acid,
[0564] said process comprising:
[0565] (a) providing a compound of Formula (XXIII):

[chemical structure]

and
[0566] (b) reacting the compound of Formula (XXIII) with a compound having the structure:

[chemical structure]

in the presence of an activating reagent and a base to produce the compound of Formula (D-1).

[0567] In one embodiment, the compound of Formula (D-1) has the following structure:

[chemical structure]

[0568] In one aspect, the present disclosure provides a linker-payload compound of formulas (D)-(G),

[chemical structure]

[chemical structure]

[chemical structure]

[chemical structure]

or a pharmaceutically acceptable salt thereof,
[0569] wherein B is selected from the group consisting of and

[chemical structure]

[0570] R¹, R², R³, and R⁴ are independently hydrogen or a C₁₋₅ alkyl, and
[0571] R⁵, R⁶, R⁷ and R⁸ are independently hydrogen, —NH₂, or a side chain of any natural or nonnatural amino acid.

[0572] In one embodiment, R¹, R², R³, and R⁴ are each hydrogens.

[0573] In one embodiment, R⁶ is H.

[0574] In one embodiment, R⁵ is selected from hydrogen and a side chain of alanine, valine, leucine, isoleucine, phenylalanine, tyrosine, threonine, lysine, asparagine, glutamine, aspartic acid, and glutamic acid. In one embodiment, R⁵ is selected from hydrogen and a side chain of phenylalanine, threonine, lysine, glutamine, and glutamic acid.

[0575] In one embodiment, R⁷ is H. In one embodiment, R⁷ is a side chain of glutamic acid.

[0576] In one embodiment, R⁸ is H. In one embodiment, R⁸ is —CH₂—SO₃H.

[0577] In one embodiment, the present disclosure provides a linker-payload having a structure selected from the group of Table 3, below.

TABLE 3
Structures of Linker-ProDXds

| | ProDXd | |
|---|---|---|
| | payload | |
| Cpd# | # | Structures |
| LP1 | P1 CP1190 | [chemical structure] |
| LP1A | P1 CP1190 | [chemical structure] |
| LP1B | P1 CP1190 | [chemical structure] |
| LP1D | P1 CP1190 | [chemical structure] |
| LP1E | P1 CP1190 | [chemical structure] |
| LP2 | P2 CP1412 | [chemical structure] |
| LP3 | P3 CP1408 | [chemical structure] |
| LP4 | P4 CP1409 | [chemical structure] |
| LP5 | P5 CP1410 | [chemical structure] |
| LP5C | P5 CP1410 | [chemical structure] |
| LP5D | P5 CP1410 | [chemical structure] |
| LP7 | P7 CP1411 | [chemical structure] |
| LP8 | P8 CP1396 | [chemical structure] |
| LP9 | P9 CP1422 | [chemical structure] |
| LP10 | P11 CP1429 | [chemical structure] |
| LP11 | P12 CP1436 | [chemical structure] |
| LP12 | P5 CP1410 | [chemical structure] |
| LP13 | P1 CP1190 | [chemical structure] |
| LP13C | P1 | [chemical structure] |
| LP14 | DXd | [chemical structure] |
| | | (SEQ ID NO: 2117) |
| LP14C | DXd | [chemical structure] |
| | | (SEQ ID NO: 2118) |
| LP15 | DXd | [chemical structure] |
| | | (SEQ ID NOS 2119 and 2119, respectively) |
| LP15C | P1 | [chemical structure] |
| | | (SEQ ID NOS 2120 and 2120, respectively) |
| LP16 | P1 | [chemical structure] |
| LP17 | DXd | [chemical structure] |

[0578] Table 4, below, provides further characterization of non-limiting examples of the linker-payloads according to the present disclosure.

TABLE 4
List of Linker-ProDXds with corresponding Payloads

| | | | | MS | | | | |
|---|---|---|---|---|---|---|---|---|
| | | | | (M/2 + H)⁺ | HPLC | | | |
| | | | | (M/Z, | purity | | From | From |
| Cpd# | Description | MF | MW | 100%) | (%) | cLogP | ProDXd | ProDXd |
| LP1 | COT-PEG₄-vcPAB-Gly- | C₆₉H₉₀FN₁₁O₁₉ | 1396.5 | 699 | 99 | 0.72 | P1 | CP1190 |
| | NHCH₂-DXd | | | | | | | |
| LP1A | TCO-PEG₄-vcPAB-Gly- | C₆₈H₉₀FN₁₁O₁₉ | 1384.5 | 693 | 99 | 1.41 | P1 | CP1190 |
| | NHCH₂-DXd | | | | | | | |
| LP1B | MeTz-PEG₄-vcPAB-Gly- | C₆₈H₈₃FN₁₄O₁₈ | 1403.5 | 702 | 99 | 0.03 | P1 | CP1190 |
| | NHCH₂-DXd | | | | | | | |
| LP1D | COT-PEG₄-EvcPAB-Gly- | C₇₄H₉₇FN₁₂O₂₂ | 1525.65 | 764 | 99 | −0.28 | P1 | CP1190 |
| | NHCH₂-DXd | | | | | | | |
| LP1E | COT-PEG₄-Cysteic- | C₇₂H₉₅FN₁₂O₂₃S | 1547.67 | 774 | 97 | −3.87 | P1 | CP1190 |
| | vcPAB-Gly-NHCH₂-DXd | | | | | | | |
| LP2 | COT-PEG₄-vcPAB-Ser- | C₇₀H₉₂FN₁₁O₂₀ | 1426.5 | 714 | 98 | 0.24 | P2 | CP1412 |
| | NHCH₂-DXd | | | | | | | |
| LP3 | COT-PEG₄-vcPAB-Gln- | C₇₂H₉₅FN₁₂O₂₀ | 1467.6 | 734 | 98 | 0.13 | P3 | CP1408 |
| | NHCH₂-DXd | | | | | | | |
| LP4 | COT-PEG₄-vcPAB-Glu- | C₇₂H₉₄FN₁₁O₂₁ | 1468.6 | 735 | 97 | 0.81 | P4 | CP1409 |
| | NHCH₂-DXd | | | | | | | |
| LP5 | COT-PEG₄-vcPAB-Lys′- | C₇₃H₉₉FN₁₂O₁₉ | 1467.6 | 734 | >99 | 1.16 | P5 | CP1410 |
| | NHCH₂-DXd | | | | | | | |
| LP5C | MeTzCO-PEG₄-vcPAB- | C₇₄H₉₅FN₁₆O₁₈ | 1515.7 | 759 | 96 | −0.33 | P5 | CP1410 |
| | Lys′-NHCH₂-DXd | | | | | | | |
| LP5D | COT-PEG₄-EvcPAB-Lys′- | C₇₈H₁₀₆FN₁₃O₂₂ | 1596.8 | 799 | 97 | −2 | P5 | CP1410 |
| | NHCH₂-DXd | | | | | | | |
| LP7 | COT-PEG₄-vcPAB-Phe- | C₇₆H₉₆FN₁₁O₁₉ | 1486.6 | 744 | >99 | 2.95 | P7 | CP1411 |
| | NHCH₂-DXd | | | | | | | |
| LP9 | COT-PEG₄-vcPAB-Gly- | C₇₀H₉₂FN₁₁O₁₉ | 1410.6 | 706 | 95 | 0.94 | P9 | CP1422 |
| | NMeCH₂-DXd | | | | | | | |
| LP8 | COT-PEG₄-vcPAB-GlyGly- | C₇₁H₉₃FN₁₂O₂₀ | 1453.6 | 727 | 98 | −0.38 | P8 | CP1396 |
| | NHCH₂-DXd | | | | | | | |
| LP10 | COT-PEG₄-vcPAB-AIB- | C₇₁H₉₄FN₁₁O₁₉ | 1424.6 | 713 | 95 | 1.72 | P11 | CP1429 |
| | NHCH₂-DXd | | | | | | | |
| LP11 | COT-PEG₄-vcPAB-^{D}Phe- | C₇₆H₉₆FN₁₁O₁₉ | 1486.64 | 744 | 98 | 2.95 | P12 | CP1436 |
| | NHCH₂-DXd | | | | | | | |
| LP12D | COT-PEG₄-EvcPAB-Lys- | C₇₈H₁₀₆FN₁₃O₂₂ | 1596.77 | 799 | 95 | 1.99 | P5 | CP1410 |
| | NHCH₂-DXd | | | | | | | |
| LP13 | COT-PEG₂-BR1-(PEG₂- | C₁₄₆H₁₉₂F₂N₂₆O₄₅ | 3069.3 | 1024 | >95 | 4.55 | P1 | CP1190 |
| | EvcPAB-ProDXd)₂ | | | (M/3 + H) | | | | |
| LP13C | MeTz-Bn-BR1-(PEG₂- | C₁₁₃H₁₂₇F₂N₂₃O₂₉ | 2309.4 | 770 (M/3 + H) | >95 | 4.96 | P1 | CP1190 |
| | EvcPAB-ProDXd)₂ | | | | | | | |
| LP14 | COT-GGFG-NHCH₂-DXd | C₅₂H₅₇FN₈O₁₂ | 1005.07 | 1005 (M + H) | 97 | 0.38 | DXd | CP1178 |
| | (SEQ ID NO: 2117) | | | | | | | |
| LP14C | MeTz-Bn-GGFG NHCH₂- | C₅₃H₅₃FN₁₂O₁₁ | 1053.1 | 1053 (M + H) | >95 | −0.81 | DXd | CP1178 |
| | DXd (SEQ ID NO: 2118) | | | | | | | |
| LP15 | COT-PEG₃-BR2-(PEG₂- | C₁₂₀H₁₄₈F₂N₂₀O₃₃ | 2436.6 | 813 (M/3 + H) | >95 | −4.94 | DXd | CP1178 |
| | GGFG-NHCH₂-DXd)₂ | | | | | | | |
| | (SEQ ID NOS 2119 and | | | | | | | |
| | 2119, respectively) | | | | | | | |
| LP15C | MeTz-Bn-BR₂-(PEG₂- | C₆₈H₈₃FN₁₄O₁₈ | 1403.5 | 702 (M/2 + H) | >95 | −5.88 | DXd | CP1178 |
| | GGFG-NHCH₂-DXd)₂ | | | | | | | |
| | (SEQ ID NOS 2120 and | | | | | | | |
| | 2120, respectively) | | | | | | | |
| LP16 | COT-PEG₄-vcPABC-DXd | C₆₆H₈₄FN₉O₁₈ | 1310.4 | 1311 (M + H) | >95 | 2.49 | DXd | CP1178 |
| LP17 | COT-PEG₄-EvcPAB- | C₇₂H₉₄FN₁₁O₂₁ | 1468.6 | 735 | >95 | 0.83 | DXd | CP1178 |
| | NHCH₂-DXd | | | | | | | |

[0579] In one aspect, the present disclosure provides a compound of Formula (1-1):

[chemical structure]

or a pharmaceutically acceptable salt thereof,
[0580] where
[0581] X is selected from the group consisting of

[chemical structure]

[0582] R¹, R², R³, and R⁴ are independently hydrogen or a C₁₋₅ alkyl, and
[0583] R⁵ and R⁶ are independently hydrogen, —NH₂, or a side chain of any natural or non-natural amino acid.

[0584] In one embodiment, the compound of Formula (1-1) has the following structure:

[chemical structure]

[0585] In one aspect, the present disclosure provides a compound of Formula (XVIII):

[chemical structure]

[0586] or a pharmaceutically acceptable salt thereof,
[0587] wherein R¹, R², R³, and R⁴ are independently hydrogen or a C₁₋₅ alkyl, and
[0588] R⁵ and R⁶ are independently hydrogen, —NH₂, or a side chain of any natural or non-natural amino acid.

[0589] In one embodiment, the compound of Formula (XVIII) has the following structure:

[chemical structure]

### Therapeutic Formulation and Administration

[0590] The present disclosure provides pharmaceutical compositions comprising the protein-drug conjugates of the present disclosure.

[0591] In one aspect, the present disclosure provides compositions comprising a population of protein-drug conjugates according to the present disclosure having a drug-antibody ratio (DAR) of about 0.5 to about 14.0.

[0592] In one embodiment, the composition has a DAR of about 1.0 to about 2.5.

[0593] In one embodiment, the composition has a DAR of about 2.

[0594] In one embodiment, the composition has a DAR of about 3.0 to about 4.5.

[0595] In one embodiment, the composition has a DAR of about 4.

[0596] In one embodiment, the composition has a DAR of about 6.5 to about 8.5.

[0597] In one embodiment, the composition has a DAR of about 8.

[0598] In one embodiment, the composition has a DAR of about 10 to about 14.

[0599] In one embodiment, the composition has a DAR of about 12.

[0600] The compositions of the disclosure are formulated with suitable carriers, excipients, and other agents that provide improved transfer, delivery, tolerance, and the like. A multitude of appropriate formulations can be found in the formulary known to all pharmaceutical chemists: Remington's Pharmaceutical Sciences, Mack Publishing Company, Easton, PA. These formulations include, for example, powders, pastes, ointments, jellies, waxes, oils, lipids, lipid (cationic or anionic) containing vesicles (such as LIPOFECTIN™, Life Technologies, Carlsbad, CA), DNA conjugates, anhydrous absorption pastes, oil-in-water and water-in-oil emulsions, emulsions carbowax (polyethylene glycols of various molecular weights), semi-solid gels, and semi-solid mixtures containing carbowax. See also Powell et al. “Compendium of excipients for parenteral formulations” PDA (1998) J Pharm Sci Technol 52:238-311.

[0601] The dose of a protein-drug conjugate administered to a patient may vary depending upon the age and the size of the patient, target disease, conditions, route of administration, and the like. The suitable dose is typically calculated according to body weight or body surface area. When a protein-drug conjugate of the present disclosure is used for therapeutic purposes in an adult patient, it may be advantageous to intravenously administer the protein-drug conjugate of the present disclosure normally at a single dose of about 0.01 to about 20 mg/kg body weight, more preferably about 0.02 to about 7, about 0.03 to about 5, or about 0.05 to about 3 mg/kg body weight. Depending on the severity of the condition, the frequency and the duration of the treatment can be adjusted. Effective dosages and schedules for administering a protein-drug conjugate may be determined empirically; for example, patient progress can be monitored by periodic assessment, and the dose adjusted accordingly. Moreover, interspecies scaling of dosages can be performed using well-known methods in the art (e.g., Mordenti et al., 1991, Pharmaceut. Res. 8:1351).

[0602] Various delivery systems are known and can be used to administer the pharmaceutical composition of the disclosure, e.g., encapsulation in liposomes, microparticles, microcapsules, recombinant cells capable of expressing the mutant viruses, receptor mediated endocytosis (see, e.g., Wu et al., 1987, J. Biol. Chem. 262:4429-4432). Methods of introduction include, but are not limited to, intradermal, intramuscular, intraperitoneal, intravenous, subcutaneous, intranasal, epidural, and oral routes. The composition may be administered by any convenient route, for example by infusion or bolus injection, by absorption through epithelial or mucocutaneous linings (e.g., oral mucosa, rectal and intestinal mucosa, etc.) and may be administered together with other biologically active agents. Administration can be systemic or local.

[0603] A pharmaceutical composition of the present disclosure can be delivered subcutaneously or intravenously with a standard needle and syringe. In addition, with respect to subcutaneous delivery, a pen delivery device readily has applications in delivering a pharmaceutical composition of the present disclosure. Such a pen delivery device can be reusable or disposable. A reusable pen delivery device generally utilizes a replaceable cartridge that contains a pharmaceutical composition. Once all of the pharmaceutical composition within the cartridge has been administered and the cartridge is empty, the empty cartridge can readily be discarded and replaced with a new cartridge that contains the pharmaceutical composition. The pen delivery device can then be reused. In a disposable pen delivery device, there is no replaceable cartridge. Rather, the disposable pen delivery device comes prefilled with the pharmaceutical composition held in a reservoir within the device. Once the reservoir is emptied of the pharmaceutical composition, the entire device is discarded.

[0604] Numerous reusable pen and autoinjector delivery devices have applications in the subcutaneous delivery of a pharmaceutical composition of the present disclosure. Examples include, but are not limited to AUTOPEN™ (Owen Mumford, Inc., Woodstock, UK), DISETRONIC™ pen (Disetronic Medical Systems, Bergdorf, Switzerland), HUMALOG MIX 75/25™ pen, HUMALOG™ pen, HUMALIN 70/30™ pen (Eli Lilly and Co., Indianapolis, IN), NOVOPEN™ I, II and III (Novo Nordisk, Copenhagen, Denmark), NOVOPEN JUNIOR™ (Novo Nordisk, Copenhagen, Denmark), BD™ pen (Becton Dickinson, Franklin Lakes, NJ), OPTIPEN™ OPTIPEN PRO™, OPTIPEN STARLET™, and OPTICLIK™ (Sanofi-Aventis, Frankfurt, Germany), to name only a few. Examples of disposable pen delivery devices having applications in subcutaneous delivery of a pharmaceutical composition of the present disclosure include, but are not limited to the SOLOSTAR™ pen (Sanofi-Aventis), the FLEXPEN™ (Novo Nordisk), and the KWIKPEN™ (Eli Lilly), the SURECLICK™ Autoinjector (Amgen, Thousand Oaks, CA), the PENLET™ (Haselmeier, Stuttgart, Germany), the EPIPEN (Dey, L.P.), and the HUMIRA™ Pen (Abbott Labs, Abbott Park IL), to name only a few.

[0605] In certain situations, the pharmaceutical composition can be delivered in a controlled release system. In one embodiment, a pump may be used (see Langer, supra; Sefton, 1987, CRC Crit. Ref. Biomed. Eng. 14:201). In another embodiment, polymeric materials can be used; see, Medical Applications of Controlled Release, Langer and Wise (eds.), 1974, CRC Pres., Boca Raton, Florida. In yet another embodiment, a controlled release system can be placed in proximity of the composition's target, thus requiring only a fraction of the systemic dose (see, e.g., Goodson, 1984, in Medical Applications of Controlled Release, supra, vol. 2, pp. 115-138). Other controlled release systems are discussed in the review by Langer, 1990, Science 249:1527-1533.

[0606] The injectable preparations may include dosage forms for intravenous, subcutaneous, intracutaneous and intramuscular injections, drip infusions, etc. These injectable preparations may be prepared by methods publicly known. For example, the injectable preparations may be prepared, e.g., by dissolving, suspending or emulsifying the antibody or its salt described above in a sterile aqueous medium or an oily medium conventionally used for injections. As the aqueous medium for injections, there are, for example, physiological saline, an isotonic solution containing glucose and other auxiliary agents, etc., which may be used in combination with an appropriate solubilizing agent such as an alcohol (e.g., ethanol), a polyalcohol (e.g., propylene glycol, polyethylene glycol), a nonionic surfactant [e.g., polysorbate 80, HCO-50 (polyoxyethylene (50 mol) adduct of hydrogenated castor oil)], etc. As the oily medium, there are employed, e.g., sesame oil, soybean oil, etc., which may be used in combination with a solubilizing agent such as benzyl benzoate, benzyl alcohol, etc. The injection thus prepared is preferably filled in an appropriate ampoule.

[0607] Advantageously, the pharmaceutical compositions for oral or parenteral use described above are prepared into dosage forms in a unit dose suited to fit a dose of the active ingredients. Such dosage forms in a unit dose include, for example, tablets, pills, capsules, injections (ampoules), suppositories, etc. The amount of the aforesaid antibody contained is generally about 5 to about 500 mg per dosage form in a unit dose; especially in the form of injection, it is preferred that the aforesaid antibody is contained in about 5 to about 100 mg and in about 10 to about 250 mg for the other dosage forms.

### Therapeutic Uses of the Protein-Drug Conjugates, Linker-Payloads and Payloads

[0608] In another aspect, the protein-drug conjugates, e.g., ADCs, disclosed herein are useful, inter alia, for the treatment, prevention and/or amelioration of a disease, disorder or condition in need of such treatment.

[0609] In one embodiment, the present invention provides a method of treating a condition in a subject in need thereof comprising administering to the subject a therapeutically effective amount of a compound (e.g., an antibody-drug conjugate, a linker-payload and/or a payload) according to the disclosure, or the composition comprising any compound according to the present disclosure.

[0610] In one embodiment, the protein-drug conjugates, e.g., ADCs, disclosed herein are useful for treating cancer. In one embodiment, the protein-drug conjugates, e.g., ADCs, disclosed herein are useful for treating a cancer selected from the group consisting of breast cancer, ovarian cancer, prostate cancer, lung cancer, liver cancer, or brain cancer. In one embodiment, the protein-drug conjugates, e.g., ADCs, disclosed herein are useful for treating HER2+ breast cancer. In one embodiment, the protein-drug conjugates, e.g., ADCs, disclosed herein are useful for treating prostate cancer.

[0611] In one aspect, the present disclosure provides a method of selectively delivering a compound into a cell. In one embodiment, the method of selectively delivering a compound into a cell comprises linking the compound to a targeted antibody. In one embodiment, the compound is a payload as described above. In one embodiment, the cell is a mammalian cell. In one embodiment, the cell is a human cell. In one embodiment, the cell is a cancer cell. In one embodiment, the cancer cell is selected from the group consisting of a breast cancer cell, an ovarian cancer cell, a prostate cancer cell, a lung cancer cell, a liver cancer cell, or a brain cancer cell.

[0612] In certain embodiments, the present disclosure provides a method of selectively delivering into a cell a compound having the structure P-I:

[chemical structure]

wherein R¹, R², R³, and R⁴ are independently hydrogen or a C₁₋₅ alkyl;
[0613] AA is a natural or a nonnatural amino acid; and
[0614] p is an integer from 1 to 6, or a pharmaceutically acceptable salt thereof.

[0615] In one aspect, the present disclosure provides a method of selectively targeting an antigen on a surface of a cell with a compound. In one embodiment, the method of selectively targeting an antigen on a surface of a cell with a compound comprises linking the compound to a targeted antibody. In one embodiment, the compound is a payload as described above. In one embodiment, the cell is a mammalian cell. In one embodiment, the cell is a human cell. In one embodiment, the cell is a cancer cell. In one embodiment, the cancer cell is selected from the group consisting of a breast cancer cell, an ovarian cancer cell, a prostate cancer cell, a lung cancer cell, a liver cancer cell, or a brain cancer cell.

[0616] In certain embodiments, the present disclosure provides a method of selectively targeting an antigen on a surface of a cell with a compound having the structure P-I:

[chemical structure]

wherein R¹, R², R³, and R⁴ are independently hydrogen or a C₁₋₅ alkyl;
[0617] AA is a natural or a nonnatural amino acid; and
[0618] p is an integer from 1 to 6, or a pharmaceutically acceptable salt thereof.

[0619] In certain embodiments of any of the above methods, the compound having the structure P-I is selected from the group consisting of:

[chemical structure]

[chemical structure]

[chemical structure]

or a pharmaceutically acceptable salt thereof.

### Binding Agents

[0620] In one embodiment, the effectiveness of the protein-drug conjugate embodiments described herein depend on the selectivity of the binding agent to bind its binding partner. In one embodiment of the present disclosure, the binding agent is any molecule capable of binding with some specificity to a given binding partner. In one embodiment, the binding agent is within a mammal where the interaction can result in a therapeutic use. In an alternative embodiment, the binding agent is in vitro where the interaction can result in a diagnostic use. In some aspects, the binding agent is capable of binding to a cell or cell population.

[0621] Suitable binding agents of the present disclosure include proteins that bind to a binding partner, wherein the binding agent comprises one or more glutamine residues. Suitable binding agents include, but are not limited to, antibodies, lymphokines, hormones, growth factors, viral receptors, interleukins, or any other cell binding or peptide binding molecules or substances.

[0622] In one embodiment the binding agent is an antibody. In certain embodiments, the antibody is selected from monoclonal antibodies, polyclonal antibodies, antibody fragments (Fab, Fab′, and F(ab)2, minibodies, diabodies, triabodies, and the like). Antibodies herein can be humanized using methods described in U.S. Pat. No. 6,596,541 and US Publication No. 2012/0096572, each incorporated by reference in their entirety. In certain embodiments of the protein-drug conjugate compounds of the present disclosure, BA is a humanized monoclonal antibody. For example, BA can be a monoclonal antibody that binds HER2, MET, or STEAP2. In certain embodiments of the protein-drug conjugate compounds of the present disclosure, BA is a bispecific antibody, e.g., an anti-HER2/HER2 bispecific antibody, or an anti-MET/MET bispecific antibody.

[0623] In the present disclosure, the antibody can be any antibody deemed suitable to the practitioner of skill. In some embodiments, the antibody comprises at least one glutamine residue in at least one polypeptide chain sequence. In certain embodiments, the antibody comprises one or more gln295 residues. In certain embodiments, the antibody comprises two heavy chain polypeptides, each with one gln295 residue. In further embodiments, the antibody comprises one or more glutamine residues at a site other than a heavy chain 295. Such antibodies can be isolated from natural sources or engineered to comprise one or more glutamine residues. Techniques for engineering glutamine residues into an antibody polypeptide chain are within the skill of the practitioners in the art. In certain embodiments, the antibody is aglycosylated.

[0624] The antibody can be in any form known to those of skill in the art. In certain embodiments, the antibody comprises a light chain. In certain embodiments, the light chain is a kappa light chain. In certain embodiments, the light chain is a lambda light chain.

[0625] In certain embodiments, the antibody comprises a heavy chain. In some aspects, the heavy chain is an IgA. In some aspects, the heavy chain is an IgD. In some aspects, the heavy chain is an IgE. In some aspects, the heavy chain is an IgG. In some aspects, the heavy chain is an IgM. In some aspects, the heavy chain is an IgG1. In some aspects, the heavy chain is an IgG2. In some aspects, the heavy chain is an IgG3. In some aspects, the heavy chain is an IgG4. In some aspects, the heavy chain is an IgA1. In some aspects, the heavy chain is an IgA2.

[0626] In some embodiments, the antibody is an antibody fragment. In some aspects, the antibody fragment is an Fv fragment. In some aspects, the antibody fragment is a Fab fragment. In some aspects, the antibody fragment is a F(ab′)2 fragment. In some aspects, the antibody fragment is a Fab′ fragment. In some aspects, the antibody fragment is an scFv (sFv) fragment. In some aspects, the antibody fragment is an scFv-Fc fragment.

[0627] In some embodiments, the antibody is a monoclonal antibody. In some embodiments, the antibody is a polyclonal antibody.

[0628] In some embodiments, the antibody is a chimeric antibody. In some embodiments, the antibody is a humanized antibody. In some embodiments, the antibody is a human antibody.

[0629] The antibody can have binding specificity for any antigen deemed suitable to those of skill in the art. In certain embodiments, the antigen is a transmembrane molecule (e.g., receptor) or a growth factor. Exemplary antigens include, but are not limited to, molecules such as renin; a growth hormone, including human growth hormone and bovine growth hormone; growth hormone releasing factor; parathyroid hormone; thyroid stimulating hormone; lipoproteins; alpha1-antitrypsin; insulin A-chain; insulin B-chain; proinsulin; follicle stimulating hormone; calcitonin; luteinizing hormone; glucagon; clotting factors such as factor vmc, factor IX, tissue factor (TF), and von Willebrands factor; anti-clotting factors such as Protein C; atrial natriuretic factor; lung surfactant; a plasminogen activator, such as urokinase or human urine or tissue-type plasminogen activator (t-PA); bombesin; thrombin; hemopoietic growth factor; tumor necrosis factor-alpha and -beta; enkephalinase; RANTES (regulated on activation normally T-cell expressed and secreted); human macrophage inflammatory protein (MIP-1-alpha); a serum albumin, such as human serum albumin; Muellerian-inhibiting substance; relaxin A-chain; relaxin B-chain; prorelaxin; mouse gonadotropin-associated peptide; a microbial protein, such as betalactamase; DNase; 19E; a cytotoxic T-lymphocyte associated antigen (CTLA), such as CTLA-4; inhibin; activin; vascular endothelial growth factor (VEGF); receptors for hormones or growth factors; protein A or D; rheumatoid factors; a neurotrophic factor such as bone-derived neurotrophic factor (BDNF), neurotrophin-3, -4, -5, or -6 (NT-3, NT4, NT-5, or NT-6), or a nerve growth factor such as NGF-β; platelet-derived growth factor (PDGF); fibroblast growth factor such as aFGF and bFGF; fibroblast growth factor receptor 2 (FGFR2), epidermal growth factor (EGF); transforming growth factor (TGF) such as TGF-alpha and TGF-beta, including TGF-β1, TGF-β2, TGF-β3, TGF-β4, or TGF-β5; insulin-like growth factor-I and -2 (IGF-I and IGF-2); des(I-3)-IGF-I (brain IGF-I), insulin-like growth factor binding proteins, EpCAM, gD3, FLT3, PSMA, PSCA, MUC1, MUC16, STEAP, STEAP2, CEA, TENB2, EphA receptors, EphB receptors, folate receptor, FOLRI, mesothelin, cripto, alphavbeta6, integrins, VEGF, VEGFR, EGFR, transferrin receptor, IRTAI, IRTA2, IRTA3, IRTA4, IRTA5; CD proteins such as CD2, CD3, CD4, CD5, CD6, CD8, CDII, CD14, CD19, CD20, CD21, CD22, CD25, CD26, CD28, CD30, CD33, CD36, CD37, CD38, CD40, CD44, CD52, CD55, CD56, CD59, CD70, CD79, CD80, CD81, CD103, CD105, CD134, CD137, CD138, CD152, or an antibody which binds to one or more tumor-associated antigens or cell-surface receptors disclosed in US Publication No. 2008/0171040 or US Publication No. 2008/0305044 and incorporated in their entirety by reference; erythropoietin; osteoinductive factors; immunotoxins; a bone morphogenetic protein (BMP); an interferon, such as interferon-alpha, -beta, and -gamma; colony stimulating factors (CSFs), e.g., M-CSF, gM-CSF, and g-CSF; interleukins (ILs), e.g., IL-1 to IL-10; superoxide dismutase; T-cell receptors; surface membrane proteins; decay accelerating factor; viral antigen such as, for example, a portion of the HIV envelope; transport proteins; homing receptors; addressins; regulatory proteins; integrins, such as CDIIa, CDIIb, CDIIc, CD18, an ICAM, VLA-4 and VCAM; a tumor associated antigen such as AFP, ALK, B7H4, BAGE proteins, β-catenin, brc-abl, BRCA1, BORIS, CA9 (carbonic anhydrase IX), caspase-8, CD20, CD40, CD123, CDK4, CEA, CLEC12A, c-kit, cMET, CTLA4, cyclin-B1, CYP1B1, EGFR, EGFRVIII, endoglin, Epcam, EphA2, ErbB2/HER2, ErbB3/HER3, ErbB4/HER4, ETV6-AML, Fra-1, FOLR1, gAGE proteins (e.g., gAGE-1, -2), gD2, gD3, globoH, glypican-3, gM3, gp100, HER2, HLA/B-raf, HLA/EBNA1, HLA/k-ras, HLA/MAGE-A3, hTERT, IGF1R, LGR5, LMP2, MAGE proteins (e.g., MAGE-1, -2, -3, -4, -6, and -12), MART-1, mesothelin, mL-IAP, Muc1, Muc16 (CA-125), MET, MUM1, NA17, NGEP, NY-BR1, NY-BR62, NY-BR85, NY-ESO1, OX40, p15, p53, PAP, PAX3, PAX5, PCTA-1, PDGFR-α, PDGFR-β, PDGF-A, PDGF-B, PDGF-C, PDGF-D, PLAC1, PRLR, PRAME, PSCA, PSGR, PSMA (FOLH1), RAGE proteins, Ras, RGS5, Rho, SART-1, SART-3, STEAP1, STEAP2, STn, survivin, TAG-72, TGF-β, TMPRSS2, Tn, TNFRSF17, TRP-1, TRP-2, tyrosinase, and uroplakin-3, and fragments of any of the herein-listed polypeptides.

[0630] Exemplary antigens also include, but are not limited to, BCMA, SLAMF7, B7H4, gPNMB, UPK3A, and LGR5. Exemplary antigens also include, but are not limited to, MUC16, PSMA, STEAP2, and HER2.

[0631] In some embodiments, antigens also include, but are not limited to, hematologic targets, e.g., CD22, CD30, CD33, CD79a, and CD79b.

[0632] Some embodiments herein are target specific for therapeutic or diagnostic use. In one embodiment, binding agents are prepared to interact with and bind to antigens defined as tumor antigens, which include antigens specific for a type of tumor or antigens that are shared, overexpressed or modified on a particular type of tumor. Examples include: alpha-actinin-4 with lung cancer, ARTC1 with melanoma, BCR-ABL fusion protein with chronic myeloid leukemia, B-RAF, CLPP or Cdc27 with melanoma, CASP-8 with squamous cell carcinoma, and hsp70-2 with renal cell carcinoma as well as the following shared tumor-specific antigens, for example: BAGE-1, gAGE, gnTV, KK-LC-1, MAGE-A2, NA88-A, TRP2-INT2. In some embodiments, the antigen is PRLR or HER2. In some embodiments, the antibody binds STEAP2, MUC16, EGFR, EGFRVIII, FGR2, or PRLR.

[0633] In some embodiments, the antigens include HER2. In some embodiments, the antigens include STEAP2. In some embodiments, the antigens include MET. In some embodiments, the antigens include EGFRVIII. In some embodiments, the antigens include MUC16. In some embodiments, the antigens include PRLR. In some embodiments, the antigens include PSMA. In some embodiments, the antigens include FGFR2.

[0634] In some embodiments, the BA is an anti-HER2 antibody, an anti-STEAP2 antibody, an anti-MET antibody, an anti-EGFRVIII antibody, an anti-MUC16 antibody, an anti-PRLR antibody, an anti-PSMA antibody, or an anti-FGFR2 antibody, an anti-HER2/HER2 bispecific antibody, an anti-MET/MET bispecific antibody, or an anti-FOLR1 antibody, or an antigen-binding fragment thereof.

[0635] In some embodiments, the BA targets a cancer selected from the group consisting of breast cancer, ovarian cancer, prostate cancer, lung cancer, liver cancer, or brain cancer. Anti-HER2 Antibodies Suitable for Protein-Drug Conjugates

[0636] In some embodiments, the antibody is an anti HER2 antibody. In some embodiments, the antibody is trastuzumab, pertuzumab (2C4) or margetuximab (MGAH22). In some embodiment, the antibody is trastuzumab. According to certain embodiments, protein-drug conjugates, e.g., ADCs, according to the disclosure comprise anti-HER2 antibody. In some embodiment, the anti-HER2 antibody may include those described in WO 2019/212965 A1.

[0637] In some embodiments, the antibody is an anti-HER2/HER2 bispecific antibody, which comprises a first antigen-binding domain (D1) which specifically binds a first epitope of human HER2 and a second antigen-binding domain (D2) which specifically binds a second epitope of human HER2.

[0638] In certain embodiments, D1 and D2 domains of an anti-HER2/HER2 bispecific antibody are non-competitive with one another. Non-competition between D1 and D2 for binding to HER2 means that, the respective monospecific antigen binding proteins from which D1 and D2 were derived do not compete with one another for binding to human HER2. Exemplary antigen-binding protein competition assays are known in the art.

[0639] In certain embodiments, D1 and D2 bind to different (e.g., non-overlapping, or partially overlapping) epitopes on HER2.

[0640] In one non-limiting embodiment, the present disclosure provides protein-drug conjugates comprising a bispecific antigen-binding molecule comprising:
[0641] a first antigen-binding domain (D1); and
[0642] a second antigen-binding domain (D2);
[0643] wherein D1 specifically binds a first epitope of human HER2; and
[0644] wherein D2 specifically binds a second epitope of human HER2.

[0645] Anti-HER2/HER2 bispecific antibodies may be constructed using the antigen-binding domains of two separate monospecific anti-HER2 antibodies. For example, a collection of monoclonal monospecific anti-HER2 antibodies may be produced using standard methods known in the art. The individual antibodies thus produced may be tested pairwise against one another for cross-competition to a HER2 protein. If two different anti-HER2 antibodies are able to bind to HER2 at the same time (i.e., do not compete with one another), then the antigen-binding domain from the first anti-HER2 antibody and the antigen-binding domain from the second, non-competitive anti-HER2 antibody can be engineered into a single anti-HER2/HER2 bispecific antibody in accordance with the present disclosure.

[0646] According to the present disclosure, a bispecific antigen-binding molecule can be a single multifunctional polypeptide, or it can be a multimeric complex of two or more polypeptides that are covalently or non-covalently associated with one another. As will be made evident by the present disclosure, any antigen binding construct which has the ability to simultaneously bind two separate, non-identical epitopes of the HER2 molecule is regarded as a bispecific antigen-binding molecule. Any of the bispecific antigen-binding molecules described herein, or variants thereof, may be constructed using standard molecular biological techniques (e.g., recombinant DNA and protein expression technology) as will be known to a person of ordinary skill in the art.

[0647] In another aspect, the disclosure provides a pharmaceutical composition comprising a recombinant human antibody or fragment thereof which specifically binds HER2 and a pharmaceutically acceptable carrier. In one non-limiting embodiment, the antibody may bind two separate epitopes on the HER2 protein, i.e., the antibody is a HER2/HER2 bispecific antibody. In a related aspect, the disclosure features a composition which is a combination of an anti-HER2/HER2 antibody and a second therapeutic agent. In one embodiment, the second therapeutic agent is any agent that is advantageously combined with an anti-HER2/HER2 antibody. Additional combination therapies and co-formulations involving the anti-HER2/HER2 bispecific antibodies of the present disclosure are disclosed elsewhere herein.

[0648] In another aspect, the disclosure provides therapeutic methods for targeting/killing tumor cells expressing HER2 using an anti-HER2/HER2 bispecific antibody of the disclosure, wherein the therapeutic methods comprise administering a therapeutically effective amount of a pharmaceutical composition comprising an anti-HER2/HER2 antibody of the disclosure to a subject in need thereof. In some cases, the anti-HER2/HER2 antibodies (or antigen-binding fragments thereof) can be used for treating breast cancer, or may be modified to be more cytotoxic by methods, including but not limited to, modified Fc domains to increase ADCC (see e.g., Shield et al. (2002) JBC 277:26733), radioimmunotherapy, antibody-drug conjugates, or other methods for increasing the efficiency of tumor ablation.

[0649] The present disclosure also includes the use of an anti-HER2 antibody of the disclosure in the manufacture of a medicament for the treatment of a disease or disorder (e.g., cancer) related to or caused by HER2-expressing cells. In one aspect, the disclosure relates to a compound comprising an anti-HER2 antibody or antigen-binding fragment, or a HER2/HER2 bispecific antibody, as disclosed herein, for use in medicine. In one aspect, the disclosure relates to a compound comprising an antibody-drug conjugate (ADC) as disclosed herein, for use in medicine.

[0650] In yet another aspect, the disclosure provides bispecific anti-HER2/HER2 antibodies for diagnostic applications, such as, e.g., imaging reagents.

### Anti-STEAP2 Antibodies Suitable for Protein-Drug Conjugates

[0651] In some embodiments, the antibody is an anti-six-transmembrane epithelial antigen of prostate 2 (STEAP2), i.e., an anti-STEAP2 antibody. STEAP2, which works as a shuttle between the Golgi complex and the plasma membrane, is a metalloreductase which reduces iron and copper, facilitating their import into the cell. STEAP2 is mainly localized to epithelial cells of the prostate. STEAP2 is also expressed in normal heart, brain, pancreas, ovary, skeletal muscle, mammary gland, testis, uterus, kidney, lung, trachea, colon, and liver. STEAP2 is over-expressed in cancerous tissues, including prostate, bladder, cervix, lung, colon, kidney, breast, pancreatic, stomach, uterus, and ovarian tumors (Gomes, I. M. et al., 2012, Mol. Cancer Res. 10:573-587; Challita-Eid-P.M., et al., 2003, WO 03/087306; Emtage, P. C. R., 2005, WO 2005/079490).

[0652] In one aspect, suitable anti-STEAP antibodies are those disclosed in US2018/0104357. Exemplary anti-STEAP2 antibodies according to the present disclosure are listed in Tables 5 and 6 herein. Table 5 sets forth the amino acid sequence identifiers of the heavy chain variable regions (HCVRs) and light chain variable regions (LCVRs), as well as heavy chain complementarity determining regions (HCDR1, HCDR2 and HCDR3), and light chain complementarity determining regions (LCDR1, LCDR2 and LCDR3) of the exemplary anti-STEAP2 antibodies. Table 6 sets forth the sequence identifiers of the nucleic acid molecules encoding the HCVRs, LCVRs, HCDR1, HCDR2 HCDR3, LCDR1, LCDR2 and LCDR3 of the exemplary anti-STEAP2 antibodies.

[0653] The present disclosure provides antibodies, or antigen-binding fragments thereof, comprising an HCVR comprising an amino acid sequence selected from any of the HCVR amino acid sequences listed in Table 5, or a substantially similar sequence thereof having at least 90%, at least 95%, at least 98% or at least 99% sequence identity thereto.

[0654] The present disclosure also provides antibodies, or antigen-binding fragments thereof, comprising an LCVR comprising an amino acid sequence selected from any of the LCVR amino acid sequences listed in Table 5, or a substantially similar sequence thereof having at least 90%, at least 95%, at least 98% or at least 99% sequence identity thereto.

[0655] The present disclosure also provides antibodies, or antigen-binding fragments thereof, comprising an HCVR and an LCVR amino acid sequence pair (HCVR/LCVR) comprising any of the HCVR amino acid sequences listed in Table 5 paired with any of the LCVR amino acid sequences listed in Table 5. According to certain embodiments, the present disclosure provides antibodies, or antigen-binding fragments thereof, comprising an HCVR/LCVR amino acid sequence pair contained within any of the exemplary anti-STEAP2 antibodies listed in Table 5. In certain embodiments, the HCVR/LCVR amino acid sequence pair is selected from the group consisting of SEQ ID NOs: 250/258 (e.g., H2M11162N).

[0656] The present disclosure also provides antibodies, or antigen-binding fragments thereof, comprising a heavy chain CDR1 (HCDR1) comprising an amino acid sequence selected from any of the HCDR1 amino acid sequences listed in Table 5 or a substantially similar sequence thereof having at least 90%, at least 95%, at least 98% or at least 99% sequence identity.

[0657] The present disclosure also provides antibodies, or antigen-binding fragments thereof, comprising a heavy chain CDR2 (HCDR2) comprising an amino acid sequence selected from any of the HCDR2 amino acid sequences listed in Table 5 or a substantially similar sequence thereof having at least 90%, at least 95%, at least 98% or at least 99% sequence identity.

[0658] The present disclosure also provides antibodies, or antigen-binding fragments thereof, comprising a heavy chain CDR3 (HCDR3) comprising an amino acid sequence selected from any of the HCDR3 amino acid sequences listed in Table 5 or a substantially similar sequence thereof having at least 90%, at least 95%, at least 98% or at least 99% sequence identity.

[0659] The present disclosure also provides antibodies, or antigen-binding fragments thereof, comprising a light chain CDR1 (LCDR1) comprising an amino acid sequence selected from any of the LCDR1 amino acid sequences listed in Table 5 or a substantially similar sequence thereof having at least 90%, at least 95%, at least 98% or at least 99% sequence identity.

[0660] The present disclosure also provides antibodies, or antigen-binding fragments thereof, comprising a light chain CDR2 (LCDR2) comprising an amino acid sequence selected from any of the LCDR2 amino acid sequences listed in Table 5 or a substantially similar sequence thereof having at least 90%, at least 95%, at least 98% or at least 99% sequence identity.

[0661] The present disclosure also provides antibodies, or antigen-binding fragments thereof, comprising a light chain CDR3 (LCDR3) comprising an amino acid sequence selected from any of the LCDR3 amino acid sequences listed in Table 5 or a substantially similar sequence thereof having at least 90%, at least 95%, at least 98% or at least 99% sequence identity.

[0662] The present disclosure also provides antibodies, or antigen-binding fragments thereof, comprising an HCDR3 and an LCDR3 amino acid sequence pair (HCDR3/LCDR3) comprising any of the HCDR3 amino acid sequences listed in Table 5 paired with any of the LCDR3 amino acid sequences listed in Table 5. According to certain embodiments, the present disclosure provides antibodies, or antigen-binding fragments thereof, comprising an HCDR3/LCDR3 amino acid sequence pair contained within any of the exemplary anti-STEAP2 antibodies listed in Table 5. In certain embodiments, the HCDR3/LCDR3 amino acid sequence pair is selected from the group consisting of SEQ ID NOs: 256/264 (e.g., H2M11162N).

[0663] The present disclosure also provides antibodies, or antigen-binding fragments thereof, comprising a set of six CDRs (i.e., HCDR1-HCDR2-HCDR3-LCDR1-LCDR2-LCDR3) contained within any of the exemplary anti-STEAP2 antibodies listed in Table 5. In certain embodiments, the HCDR1-HCDR2-HCDR3-LCDR1-LCDR2-LCDR3 amino acid sequences set is selected from the group consisting of SEQ ID NOs: 252-254-256-260-262-264 (e.g., H2M 11162N).

[0664] In a related embodiment, the present disclosure provides antibodies, or antigen-binding fragments thereof, comprising a set of six CDRs (i.e., HCDR1-HCDR2-HCDR3-LCDR1-LCDR2-LCDR3) contained within an HCVR/LCVR amino acid sequence pair as defined by any of the exemplary anti-STEAP2 antibodies listed in Table 5. For example, the present disclosure includes antibodies, or antigen-binding fragments thereof, comprising the HCDR1-HCDR2-HCDR3-LCDR1-LCDR2-LCDR3 amino acid sequences set contained within an HCVR/LCVR amino acid sequence pair selected from the group consisting of SEQ ID NOs: 250/258 (e.g., H2M11162N). Methods and techniques for identifying CDRs within HCVR and LCVR amino acid sequences are well known in the art and can be used to identify CDRs within the specified HCVR and/or LCVR amino acid sequences disclosed herein. Exemplary conventions that can be used to identify the boundaries of CDRs include, e.g., the Kabat definition, the Chothia definition, and the AbM definition. In general terms, the Kabat definition is based on sequence variability, the Chothia definition is based on the location of the structural loop regions, and the AbM definition is a compromise between the Kabat and Chothia approaches. See, e.g., Kabat, “Sequences of Proteins of Immunological Interest,” National Institutes of Health, Bethesda, Md. (1991); Al-Lazikani et al., J. Mol. Biol. 273:927-948 (1997); and Martin et al., Proc. Natl. Acad. Sci. USA 86:9268-9272 (1989). Public databases are also available for identifying CDR sequences within an antibody.

[0665] The present disclosure also provides nucleic acid molecules encoding anti-STEAP2 antibodies or portions thereof. For example, the present disclosure provides nucleic acid molecules encoding any of the HCVR amino acid sequences listed in Table 5; in certain embodiments the nucleic acid molecule comprises a polynucleotide sequence selected from any of the HCVR nucleic acid sequences listed in Table 6, or a substantially similar sequence thereof having at least 90%, at least 95%, at least 98% or at least 99% sequence identity thereto.

[0666] The present disclosure also provides nucleic acid molecules encoding any of the LCVR amino acid sequences listed in Table 5; in certain embodiments the nucleic acid molecule comprises a polynucleotide sequence selected from any of the LCVR nucleic acid sequences listed in Table 6, or a substantially similar sequence thereof having at least 90%, at least 95%, at least 98% or at least 99% sequence identity thereto.

[0667] The present disclosure also provides nucleic acid molecules encoding any of the HCDR1 amino acid sequences listed in Table 5; in certain embodiments the nucleic acid molecule comprises a polynucleotide sequence selected from any of the HCDR1 nucleic acid sequences listed in Table 6, or a substantially similar sequence thereof having at least 90%, at least 95%, at least 98% or at least 99% sequence identity thereto.

[0668] The present disclosure also provides nucleic acid molecules encoding any of the HCDR2 amino acid sequences listed in Table 5; in certain embodiments the nucleic acid molecule comprises a polynucleotide sequence selected from any of the HCDR2 nucleic acid sequences listed in Table 6, or a substantially similar sequence thereof having at least 90%, at least 95%, at least 98% or at least 99% sequence identity thereto.

[0669] The present disclosure also provides nucleic acid molecules encoding any of the HCDR3 amino acid sequences listed in Table 5; in certain embodiments the nucleic acid molecule comprises a polynucleotide sequence selected from any of the HCDR3 nucleic acid sequences listed in Table 6, or a substantially similar sequence thereof having at least 90%, at least 95%, at least 98% or at least 99% sequence identity thereto.

[0670] The present disclosure also provides nucleic acid molecules encoding any of the LCDR1 amino acid sequences listed in Table 5; in certain embodiments the nucleic acid molecule comprises a polynucleotide sequence selected from any of the LCDR1 nucleic acid sequences listed in Table 6, or a substantially similar sequence thereof having at least 90%, at least 95%, at least 98% or at least 99% sequence identity thereto.

[0671] The present disclosure also provides nucleic acid molecules encoding any of the LCDR2 amino acid sequences listed in Table 5; in certain embodiments the nucleic acid molecule comprises a polynucleotide sequence selected from any of the LCDR2 nucleic acid sequences listed in Table 6, or a substantially similar sequence thereof having at least 90%, at least 95%, at least 98% or at least 99% sequence identity thereto.

[0672] The present disclosure also provides nucleic acid molecules encoding any of the LCDR3 amino acid sequences listed in Table 5; in certain embodiments the nucleic acid molecule comprises a polynucleotide sequence selected from any of the LCDR3 nucleic acid sequences listed in Table 6, or a substantially similar sequence thereof having at least 90%, at least 95%, at least 98% or at least 99% sequence identity thereto.

[0673] The present disclosure also provides nucleic acid molecules encoding an HCVR, wherein the HCVR comprises a set of three CDRs (i.e., HCDR1-HCDR2-HCDR3), wherein the HCDR1-HCDR2-HCDR3 amino acid sequence set is as defined by any of the exemplary anti-STEAP2 antibodies listed in Table 5.

[0674] The present disclosure also provides nucleic acid molecules encoding an LCVR, wherein the LCVR comprises a set of three CDRs (i.e., LCDR1-LCDR2-LCDR3), wherein the LCDR1-LCDR2-LCDR3 amino acid sequence set is as defined by any of the exemplary anti-STEAP2 antibodies listed in Table 5.

[0675] The present disclosure also provides nucleic acid molecules encoding both an HCVR and an LCVR, wherein the HCVR comprises an amino acid sequence of any of the HCVR amino acid sequences listed in Table 5, and wherein the LCVR comprises an amino acid sequence of any of the LCVR amino acid sequences listed in Table 5. In certain embodiments, the nucleic acid molecule comprises a polynucleotide sequence selected from any of the HCVR nucleic acid sequences listed in Table 6, or a substantially similar sequence thereof having at least 90%, at least 95%, at least 98% or at least 99% sequence identity thereto, and a polynucleotide sequence selected from any of the LCVR nucleic acid sequences listed in Table 6, or a substantially similar sequence thereof having at least 90%, at least 95%, at least 98% or at least 99% sequence identity thereto. In certain embodiments according to this aspect of the disclosure, the nucleic acid molecule encodes an HCVR and LCVR, wherein the HCVR and LCVR are both derived from the same anti-STEAP2 antibody listed in Table 5.

[0676] The present disclosure also provides recombinant expression vectors capable of expressing a polypeptide comprising a heavy or light chain variable region of an anti-STEAP2 antibody. For example, the present disclosure includes recombinant expression vectors comprising any of the nucleic acid molecules mentioned above, i.e., nucleic acid molecules encoding any of the HCVR, LCVR, and/or CDR sequences as set forth in Table 5. Also included within the scope of the present disclosure are host cells into which such vectors have been introduced, as well as methods of producing the antibodies or portions thereof by culturing the host cells under conditions permitting production of the antibodies or antibody fragments, and recovering the antibodies and antibody fragments so produced.

[0677] The present disclosure includes anti-STEAP2 antibodies having a modified glycosylation pattern. In some embodiments, modification to remove undesirable glycosylation sites may be useful, or an antibody lacking a fucose moiety present on the oligosaccharide chain, for example, to increase antibody dependent cellular cytotoxicity (ADCC) function (see Shield et al. (2002) JBC 277:26733). In other applications, modification of galactosylation can be made in order to modify complement dependent cytotoxicity (CDC).

[0678] In another aspect, the disclosure provides a pharmaceutical composition comprising a recombinant human antibody or fragment thereof which specifically binds STEAP2 and a pharmaceutically acceptable carrier. In a related aspect, the disclosure features a composition which is a combination of an anti-STEAP2 antibody and a second therapeutic agent. In one embodiment, the second therapeutic agent is any agent that is advantageously combined with an anti-STEAP2 antibody. Additional combination therapies and co-formulations involving the anti-STEAP2 antibodies of the present disclosure are disclosed elsewhere herein.

[0679] In another aspect, the disclosure provides therapeutic methods for targeting/killing tumor cells expressing STEAP2 using an anti-STEAP2 antibody of the disclosure, wherein the therapeutic methods comprise administering a therapeutically effective amount of a pharmaceutical composition comprising an anti-STEAP2 antibody of the disclosure to a subject in need thereof. In some cases, the anti-STEAP2 antibodies (or antigen-binding fragments thereof) can be used for treating prostate cancer, or may be modified to be more cytotoxic by methods, including but not limited to, modified Fc domains to increase ADCC (see e.g., Shield et al. (2002) JBC 277:26733), radioimmunotherapy, antibody-drug conjugates, or other methods for increasing the efficiency of tumor ablation.

[0680] The present disclosure also includes the use of an anti-STEAP2 antibody of the disclosure in the manufacture of a medicament for the treatment of a disease or disorder (e.g., cancer) related to or caused by STEAP2-expressing cells. In one aspect, the disclosure relates to a compound comprising an anti-STEAP2 antibody or antigen-binding fragment, or a STEAP2×CD3 bispecific antibody, as disclosed herein, for use in medicine. In one aspect, the disclosure relates to a compound comprising an antibody-drug conjugate (ADC) as disclosed herein, for use in medicine.

[0681] In yet another aspect, the disclosure provides monospecific anti-STEAP2 antibodies for diagnostic applications, such as, e.g., imaging reagents.

[0682] In yet another aspect, the disclosure provides therapeutic methods for stimulating T cell activation using an anti-CD3 antibody or antigen-binding portion of an antibody of the disclosure, wherein the therapeutic methods comprise administering a therapeutically effective amount of a pharmaceutical composition comprising an antibody

[0683] In another aspect, the present disclosure provides an isolated antibody or antigen-binding fragment thereof that binds STEAP2-expressing C4-2 cells with an EC50 of less than 50 nM as measured by FACS analysis. In another aspect, the present disclosure provides an isolated antibody or antigen-binding fragment thereof that binds and is internalized by STEAP2-expressing C4-2 cells.

[0684] The disclosure further provides an antibody or antigen-binding fragment that competes for binding to human STEAP2 with a reference antibody comprising an HCVR/LCVR amino acid sequence pair as set forth in Table 5. In another aspect, the disclosure provides an antibody or antigen-binding fragment that competes for binding to human STEAP2 with a reference antibody comprising an HCVR/LCVR amino acid sequence pair selected from the group consisting of SEQ ID NOs:2/10; 18/26; 34/42; 50/58; 66/58; 74/58; 82/58; 90/58; 98/58; 106/114; 122/130; 138/146; 154/162; 170/178; 186/194; 202/210; 218/226; 234/242; 250/258; 266/274; 282/290; 298/306; 314/322; 330/338; 346/354; 362/370; and 378/386.

[0685] The disclosure furthermore provides an antibody or antigen-binding fragment, wherein the antibody or antigen-binding fragment thereof binds to the same epitope on human STEAP2 as a reference antibody comprising an HCVR/LCVR amino acid sequence pair as set forth in Table 5. In another aspect, the antibody or antigen-binding fragment binds to the same epitope on human STEAP2 as a reference antibody comprising an HCVR/LCVR amino acid sequence pair selected from the group consisting of SEQ ID NOs:2/10; 18/26; 34/42; 50/58; 66/58; 74/58; 82/58; 90/58; 98/58; 106/114; 122/130; 138/146; 154/162; 170/178; 186/194; 202/210; 218/226; 234/242; 250/258; 266/274; 282/290; 298/306; 314/322; 330/338; 346/354; 362/370; and 378/386.

[0686] The disclosure further provides an isolated antibody or antigen-binding fragment thereof that binds human STEAP2, wherein the antibody or antigen-binding fragment comprises: the complementarity determining regions (CDRs) of a heavy chain variable region (HCVR) having an amino acid sequence as set forth in Table 5; and the CDRs of a light chain variable region (LCVR) having an amino acid sequence as set forth in Table 5. In another aspect, the isolated antibody or antigen-binding fragment comprises the heavy and light chain CDRs of a HCVR/LCVR amino acid sequence pair selected from the group consisting of: SEQ ID NOs:2/10; 18/26; 34/42; 50/58; 66/58; 74/58; 82/58; 90/58; 98/58; 106/114; 122/130; 138/146; 154/162; 170/178; 186/194; 202/210; 218/226; 234/242; 250/258; 266/274; 282/290; 298/306; 314/322; 330/338; 346/354; 362/370; and 378/386. In yet another aspect, the isolated antibody or antigen-binding fragment comprises HCDR1-HCDR2-HCDR3-LCDR1-LCDR2-LCDR3 domains, respectively, selected from the group consisting of: SEQ ID NOs:4-6-8-12-14-16; 20-22-24-28-30-32; 36-38-40-44-46-48; 52-54-56-60-62-64; 68-70-72-60-62-64; 76-78-80-60-62-64; 84-86-88-60-62-64; 92-94-96-60-62-64; 100-102-104-60-62-64; 108-110-112-116-118-120; 124-126-128-132-134-136; 140-142-144-148-150-152; 156-158-160-164-166-168; 172-174-176-180-182-184; 188-190-192-196-198-200; 204-206-208-212-214-216; 220-222-224-228-230-232; 236-238-240-244-246-248; 252-254-256-260-262-264; 268-270-272-276-278-280; 284-286-288-292-294-296; 300-302-304-308-310-312; 316-318-320-324-326-328; 332-334-336-340-342-344; 348-350-352-356-358-360; 364-366-368-372-374-376; and 380-382-384-388-390-392.

[0687] In another aspect, the disclosure provides an isolated antibody or antigen-binding fragment thereof that binds human STEAP2, wherein the antibody or antigen-binding fragment comprises: (a) a heavy chain variable region (HCVR) having an amino acid sequence selected from the group consisting of SEQ ID NOs: 2, 18, 34, 50, 66, 74, 82, 90, 98, 106, 122, 138, 154, 170, 186, 202, 218, 234, 250, 266, 282, 298, 314, 330, 346, 362, and 378; and (b) a light chain variable region (LCVR) having an amino acid sequence selected from the group consisting of SEQ ID NOs: 10; 26; 42; 58 114; 130; 146; 162; 178; 194; 210; 226, 242; 258; 274; 290; 306; 322; 338; 354; 370; and 386. In a further aspect, the isolated antibody or antigen-binding fragment of claim 10, wherein the antibody or antigen-binding fragment comprises a HCVR/LCVR amino acid sequence pair selected from the group consisting of: SEQ ID NOs:2/10; 18/26; 34/42; 50/58; 66/58; 74/58; 82/58; 90/58; 98/58; 106/114; 122/130; 138/146; 154/162; 170/178; 186/194; 202/210; 218/226; 234/242; 250/258; 266/274; 282/290; 298/306; 314/322; 330/338; 346/354; 362/370; and 378/386.

[0688] According to another aspect, the present disclosure provides antibody-drug conjugates comprising an anti-STEAP2 antibody or antigen-binding fragment thereof as described above and a therapeutic agent (e.g., an anti-tumor agent, e.g., a camptothecin analog, e.g., Dxd). In some embodiments, the antibody or antigen-binding fragment and the anti-tumor agent are covalently attached via a linker, as discussed above. In various embodiments, the anti-STEAP2 antibody or antigen-binding fragment can be any of the anti-STEAP 2 antibodies or fragments described herein.

[0689] Heavy and Light Chain Variable Region Amino Acid and Nucleic Acid Sequences of anti-STEAP2 antibodies

[0690] Table 5 sets forth the amino acid sequence identifiers of the heavy and light chain variable regions and CDRs of selected anti-STEAP2 antibodies according to the disclosure. The corresponding nucleic acid sequence identifiers are set forth in Table 6.

TABLE 5
Amino Acid Sequence Identifiers of anti-STEAP2 antibodies

| Antibody | SEQ ID NOs: | | | | | | | |
|---|---|---|---|---|---|---|---|---|
| Designation | HCVR | HCDR1 | HCDR2 | HCDR3 | LCVR | LCDR1 | LCDR2 | LCDR3 |
| H1H11243N | 2 | 4 | 6 | 8 | 10 | 12 | 14 | 16 |
| H1H11878P | 18 | 20 | 22 | 24 | 26 | 28 | 30 | 32 |
| H1H11880P | 34 | 36 | 38 | 40 | 42 | 44 | 46 | 48 |
| H1H11888P2 | 50 | 52 | 54 | 56 | 58 | 60 | 62 | 64 |
| H1H11892P2 | 66 | 68 | 70 | 72 | 58 | 60 | 62 | 64 |
| H1H11893P2 | 74 | 76 | 78 | 80 | 58 | 60 | 62 | 64 |
| H1H11894P2 | 82 | 84 | 86 | 88 | 58 | 60 | 62 | 64 |
| H1H11895P2 | 90 | 92 | 94 | 96 | 58 | 60 | 62 | 64 |
| H1H11896P2 | 98 | 100 | 102 | 104 | 58 | 60 | 62 | 64 |
| H1H11897P2 | 106 | 108 | 110 | 112 | 114 | 116 | 118 | 120 |
| H1H7968P | 122 | 124 | 126 | 128 | 130 | 132 | 134 | 136 |
| H1H7969P | 138 | 140 | 142 | 144 | 146 | 148 | 150 | 152 |
| H1H7970P | 154 | 156 | 158 | 160 | 162 | 164 | 166 | 168 |
| H1H7971P | 170 | 172 | 174 | 176 | 178 | 180 | 182 | 184 |
| H1H7972P | 186 | 188 | 190 | 192 | 194 | 196 | 198 | 200 |
| H1M7804N | 202 | 204 | 206 | 208 | 210 | 212 | 214 | 216 |
| H1M7814N | 218 | 220 | 222 | 224 | 226 | 228 | 230 | 232 |
| H1M7832N | 234 | 236 | 238 | 240 | 242 | 244 | 246 | 248 |
| H2M11162N | 250 | 252 | 254 | 256 | 258 | 260 | 262 | 264 |
| H2M11163N | 266 | 268 | 270 | 272 | 274 | 276 | 278 | 280 |
| H2M11164N | 282 | 284 | 286 | 288 | 290 | 292 | 294 | 296 |
| H2M7806N | 298 | 300 | 302 | 304 | 306 | 308 | 310 | 312 |
| H2M7807N | 314 | 316 | 318 | 320 | 322 | 324 | 326 | 328 |
| H2M7809N | 330 | 332 | 334 | 336 | 338 | 340 | 342 | 344 |
| H2M7810N | 346 | 348 | 350 | 352 | 354 | 356 | 358 | 360 |
| H2M7811N | 362 | 364 | 366 | 368 | 370 | 372 | 374 | 376 |
| H2M7812N | 378 | 380 | 382 | 384 | 386 | 388 | 390 | 392 |

TABLE 6
Nucleic Acid Sequence Identifiers of Anti-STEAP2 Antibodies

| Antibody | SEQ ID NOs: | | | | | | | |
|---|---|---|---|---|---|---|---|---|
| Designation | HCVR | HCDR1 | HCDR2 | HCDR3 | LCVR | LCDR1 | LCDR2 | LCDR3 |
| H1H11243N | 1 | 3 | 5 | 7 | 9 | 11 | 13 | 15 |
| H1H11878P | 17 | 19 | 21 | 23 | 25 | 27 | 29 | 31 |
| H1H11880P | 33 | 35 | 37 | 39 | 41 | 43 | 45 | 47 |
| H1H11888P2 | 49 | 51 | 53 | 55 | 57 | 59 | 61 | 63 |
| H1H11892P2 | 65 | 67 | 69 | 71 | 57 | 59 | 61 | 63 |
| H1H11893P2 | 73 | 75 | 77 | 79 | 57 | 59 | 61 | 63 |
| H1H11894P2 | 81 | 83 | 85 | 87 | 57 | 59 | 61 | 63 |
| H1H11895P2 | 89 | 91 | 93 | 95 | 57 | 59 | 61 | 63 |
| H1H11896P2 | 97 | 99 | 101 | 103 | 57 | 59 | 61 | 63 |
| H1H11897P2 | 105 | 107 | 109 | 111 | 113 | 115 | 117 | 119 |
| H1H7968P | 121 | 123 | 125 | 127 | 129 | 131 | 133 | 135 |
| H1H7969P | 137 | 139 | 141 | 143 | 145 | 147 | 149 | 151 |
| H1H7970P | 153 | 155 | 157 | 159 | 161 | 163 | 165 | 167 |
| H1H7971P | 169 | 171 | 173 | 175 | 177 | 179 | 181 | 183 |
| H1H7972P | 185 | 187 | 189 | 191 | 193 | 195 | 197 | 199 |
| H1M7804N | 201 | 203 | 205 | 207 | 209 | 211 | 213 | 215 |
| H1M7814N | 217 | 219 | 221 | 223 | 225 | 227 | 229 | 23 |
| H1M7832N | 233 | 235 | 237 | 239 | 241 | 243 | 245 | 247 |
| H2M11162N | 249 | 251 | 253 | 255 | 257 | 259 | 261 | 263 |
| H2M11163N | 265 | 267 | 269 | 271 | 273 | 275 | 277 | 279 |
| H2M11164N | 281 | 283 | 285 | 287 | 289 | 291 | 293 | 295 |
| H2M7806N | 297 | 299 | 301 | 303 | 305 | 307 | 309 | 311 |
| H2M7807N | 313 | 315 | 317 | 319 | 321 | 323 | 325 | 327 |
| H2M7809N | 329 | 331 | 333 | 335 | 337 | 339 | 341 | 343 |
| H2M7810N | 345 | 347 | 349 | 351 | 353 | 355 | 357 | 359 |
| H2M7811N | 361 | 363 | 365 | 367 | 369 | 371 | 373 | 375 |

### Anti-MET Antibodies Suitable for Protein-Drug Conjugates

[0691] In some embodiments, the antibody is an anti MET antibody. According to certain embodiments, protein-drug conjugates, e.g., ADCs, according to the disclosure comprise anti-MET antibody. In some embodiment, the anti-MET antibody may include those described in US 2018/0134794.

[0692] In some embodiments, the antibody is an anti-MET/MET bispecific antibody, which comprises a first antigen-binding domain (D1) which specifically binds a first epitope of human MET and a second antigen-binding domain (D2) which specifically binds a second epitope of human MET. In some embodiment, the anti-MET/MET bispecific antibody may include those described in US 2018/0134794.

[0693] In certain embodiments, D1 and D2 domains of an anti-MET/MET bispecific antibody are non-competitive with one another. Non-competition between D1 and D2 for binding to MET means that, the respective monospecific antigen binding proteins from which D1 and D2 were derived do not compete with one another for binding to human MET. Exemplary antigen-binding protein competition assays are known in the art.

[0694] In certain embodiments, D1 and D2 bind to different (e.g., non-overlapping, or partially overlapping) epitopes on MET.

[0695] In one non-limiting embodiment, the present disclosure provides protein-drug conjugates comprising a bispecific antigen-binding molecule comprising:
[0696] a first antigen-binding domain (D1); and
[0697] a second antigen-binding domain (D2);
[0698] wherein D1 specifically binds a first epitope of human MET; and
[0699] wherein D2 specifically binds a second epitope of human MET.

[0700] Anti-MET/MET bispecific antibodies may be constructed using the antigen-binding domains of two separate monospecific anti-MET antibodies. For example, a collection of monoclonal monospecific anti-MET antibodies may be produced using standard methods known in the art. The individual antibodies thus produced may be tested pairwise against one another for cross-competition to a MET protein. If two different anti-MET antibodies are able to bind to MET at the same time (i.e., do not compete with one another), then the antigen-binding domain from the first anti-MET antibody and the antigen-binding domain from the second, non-competitive anti-MET antibody can be engineered into a single anti-MET/MET bispecific antibody in accordance with the present disclosure.

[0701] According to the present disclosure, a bispecific antigen-binding molecule can be a single multifunctional polypeptide, or it can be a multimeric complex of two or more polypeptides that are covalently or non-covalently associated with one another. As will be made evident by the present disclosure, any antigen binding construct which has the ability to simultaneously bind two separate, non-identical epitopes of the MET molecule is regarded as a bispecific antigen-binding molecule. Any of the bispecific antigen-binding molecules described herein, or variants thereof, may be constructed using standard molecular biological techniques (e.g., recombinant DNA and protein expression technology) as will be known to a person of ordinary skill in the art.

[0702] The bispecific antigen-binding molecules, which comprise a first antigen-binding domain (D1) which specifically binds a first epitope of human MET and a second antigen-binding domain (D2) which specifically binds a second epitope of human MET, may be referred to herein as “MET/MET bispecific antibodies,” “MET×MET bispecific antibodies,” “MET/MET,” “MET×MET” or other related terminology. In some embodiments, the first epitope of human MET comprises amino acids 192-204 of SEQ ID NO:2109. In some embodiments, the second epitope of human MET comprises amino acids 305-315 and 421-455 of SEQ ID NO:2109. In some embodiments, the first epitope of human MET comprises amino acids 192-204 of SEQ ID NO:2109; and the second epitope of human MET comprises amino acids 305-315 and 421-455 of SEQ ID NO:2109.

[0703] Exemplary antigen-binding domains (D1 and D2) that can be included in the MET×MET bispecific antigen-binding molecules provided herein include antigen-binding domains derived from any of the anti-MET antibodies disclosed herein. For example, the present disclosure includes MET×MET bispecific antigen-binding molecules comprising a D1 or D2 antigen-binding domain comprising an HCVR comprising an amino acid sequence selected from any of the HCVR amino acid sequences listed in Table 7, or a substantially similar sequence thereof having at least 90%, at least 95%, at least 98% or at least 99% sequence identity thereto.

[0704] Also provided herein are MET×MET bispecific antigen-binding molecules comprising a D1 or D2 antigen-binding domain comprising an LCVR comprising an amino acid sequence selected from any of the LCVR amino acid sequences listed in Table 7, or a substantially similar sequence thereof having at least 90%, at least 95%, at least 98% or at least 99% sequence identity thereto.

[0705] Provided herein are MET×MET bispecific antigen-binding molecules comprising a D1 or D2 antigen-binding domain comprising an HCVR and an LCVR amino acid sequence pair (HCVR/LCVR) comprising any of the HCVR amino acid sequences listed in Table 7 paired with any of the LCVR amino acid sequences listed in Table 7. According to certain embodiments, the present invention provides MET×MET bispecific antigen-binding molecules comprising a D1 or D2 antigen-binding domain comprising an HCVR/LCVR amino acid sequence pair contained within any of the exemplary anti-MET antibodies listed in Table 7.

[0706] Also provided herein are MET×MET bispecific antigen-binding molecules comprising a D1 or D2 antigen-binding domain comprising a heavy chain CDR1 (HCDR1) comprising an amino acid sequence selected from any of the HCDR1 amino acid sequences listed in Table 7 or a substantially similar sequence thereof having at least 90%, at least 95%, at least 98% or at least 99% sequence identity.

[0707] Also provided are MET×MET bispecific antigen-binding molecules comprising a D1 or D2 antigen-binding domain comprising a heavy chain CDR2 (HCDR2) comprising an amino acid sequence selected from any of the HCDR2 amino acid sequences listed in Table 7 or a substantially similar sequence thereof having at least 90%, at least 95%, at least 98% or at least 99% sequence identity.

[0708] Also provided are MET×MET bispecific antigen-binding molecules comprising a D1 or D2 antigen-binding domain comprising a heavy chain CDR3 (HCDR3) comprising an amino acid sequence selected from any of the HCDR3 amino acid sequences listed in Table 7 or a substantially similar sequence thereof having at least 90%, at least 95%, at least 98% or at least 99% sequence identity.

[0709] Also provided are MET×MET bispecific antigen-binding molecules comprising a D1 or D2 antigen-binding domain comprising a light chain CDR1 (LCDR1) comprising an amino acid sequence selected from any of the LCDR1 amino acid sequences listed in Table 7 or a substantially similar sequence thereof having at least 90%, at least 95%, at least 98% or at least 99% sequence identity.

[0710] Also provided are MET×MET bispecific antigen-binding molecules comprising a D1 or D2 antigen-binding domain comprising a light chain CDR2 (LCDR2) comprising an amino acid sequence selected from any of the LCDR2 amino acid sequences listed in Table 7 or a substantially similar sequence thereof having at least 90%, at least 95%, at least 98% or at least 99% sequence identity.

[0711] Also provided are MET×MET bispecific antigen-binding molecules comprising a D1 or D2 antigen-binding domain comprising a light chain CDR3 (LCDR3) comprising an amino acid sequence selected from any of the LCDR3 amino acid sequences listed in Table 7 or a substantially similar sequence thereof having at least 90%, at least 95%, at least 98% or at least 99% sequence identity.

[0712] Also provided are MET×MET bispecific antigen-binding molecules comprising a D1 or D2 antigen-binding domain comprising an HCDR3 and an LCDR3 amino acid sequence pair (HCDR3/LCDR3) comprising any of the HCDR3 amino acid sequences listed in Table 7 paired with any of the LCDR3 amino acid sequences listed in Table 7. According to certain embodiments, the present disclosure provides antibodies, or antigen-binding fragments thereof, comprising an HCDR3/LCDR3 amino acid sequence pair contained within any of the exemplary anti-MET antibodies listed in Table 7.

[0713] Also provided are MET×MET bispecific antigen-binding molecules comprising a D1 or D2 antigen-binding domain comprising a set of six CDRs (i.e., HCDR1-HCDR2-HCDR3-LCDR1-LCDR2-LCDR3) contained within any of the exemplary anti-MET antibodies listed in Table 7.

[0714] In a related embodiment, the present disclosure provides MET×MET bispecific antigen-binding molecules comprising a D1 or D2 antigen-binding domain comprising a set of six CDRs (i.e., HCDR1-HCDR2-HCDR3-LCDR1-LCDR2-LCDR3) contained within an HCVR/LCVR amino acid sequence pair as defined by any of the exemplary anti-MET antibodies listed in Table 7.

[0715] The MET×MET bispecific antigen-binding molecules provided herein may comprise a D1 antigen-binding domain derived from any of the anti-MET antibodies of Table 7, and a D2 antigen-binding domain derived from any other anti-MET antibody of Table 7.

[0716] As a non-limiting illustrative example, the present disclosure includes MET×MET bispecific antigen binding molecules comprising a D1 antigen-binding domain and a D2 antigen-binding domain, wherein the D1 antigen binding domain comprises an HCVR/LCVR amino acid sequence pair of SEQ ID NOs: 2012/2092, or a set of heavy and light chain CDRs (HCDR1-HCDR2-HCDR3-LCDR1-LCDR2-LCDR3) comprising SEQ ID NOs: 2014-2016-2018-2094-2096-2098, and wherein the D2 antigen-binding domain comprises an HCVR/LCVR amino acid sequence pair of SEQ ID NOs: 2036/2092, or a set of heavy and light chain CDRs (HCDR1-HCDR2-HCDR3-LCDR1-LCDR2-LCDR3) comprising SEQ ID NOs: 2038-2040-2042-2094-2096-2098. An exemplary MET×MET bispecific antibody having these sequence characteristics is the bispecific antibody designated H4H14639D, also referred to as bispecific antibody No. 2076, which comprises a D1 derived from H4H13306P2 and a D2 derived from H4H13312P2.

Heavy and Light Chain Variable Region Amino Acid and Nucleic Acid Sequences for anti-MET and MET/MET antibodies

[0717] Table 7 sets forth the amino acid sequence identifiers of the heavy and light chain variable regions and CDRs of selected anti-MET antibodies described herein. (As noted above, all anti-MET antibodies of the present disclosure possess the same light chain variable region, and thus the same light chain CDR sequences as well). The corresponding nucleic acid sequence identifiers are set forth in Table 8.

TABLE 7
Amino Acid Sequence Identifiers

| Antibody | SEQ ID NOs: | | | | | | | |
|---|---|---|---|---|---|---|---|---|
| Designation | HCVR | HCDR1 | HCDR2 | HCDR3 | LCVR | LCDR1 | LCDR2 | LCDR3 |
| H4H13290P2 | 1956 | 1958 | 1960 | 1962 | 2092 | 2094 | 2096 | 2098 |
| H4H13291P2 | 1964 | 1966 | 1968 | 1970 | 2092 | 2094 | 2096 | 2098 |
| H4H13295P2 | 1972 | 1974 | 1976 | 1978 | 2092 | 2094 | 2096 | 2098 |
| H4H13299P2 | 1980 | 1982 | 1984 | 1986 | 2092 | 2094 | 2096 | 2098 |
| H4H13300P2 | 1988 | 1990 | 1992 | 1994 | 2092 | 2094 | 2096 | 2098 |
| H4H13301P2 | 1996 | 1998 | 2000 | 2002 | 2092 | 2094 | 2096 | 2098 |
| H4H13302P2 | 2004 | 2006 | 2008 | 2010 | 2092 | 2094 | 2096 | 2098 |
| H4H13306P2 | 2012 | 2014 | 2016 | 2018 | 2092 | 2094 | 2096 | 2098 |
| H4H13309P2 | 2020 | 2022 | 2024 | 2026 | 2092 | 2094 | 2096 | 2098 |
| H4H13311P2 | 2028 | 2030 | 2032 | 2034 | 2092 | 2094 | 2096 | 2098 |
| H4H13312P2 | 2036 | 2038 | 2040 | 2042 | 2092 | 2094 | 2096 | 2098 |
| H4H13313P2 | 2044 | 2046 | 2048 | 2050 | 2092 | 2094 | 2096 | 2098 |
| H4H13316P2 | 2052 | 2054 | 2056 | 2058 | 2092 | 2094 | 2096 | 2098 |
| H4H13318P2 | 2060 | 2062 | 2064 | 2066 | 2092 | 2094 | 2096 | 2098 |
| H4H13319P2 | 2068 | 2070 | 2072 | 2074 | 2092 | 2094 | 2096 | 2098 |
| H4H13325P2 | 2076 | 2078 | 2080 | 2082 | 2092 | 2094 | 2096 | 2098 |
| H4H13331P2 | 2084 | 2086 | 2088 | 2090 | 2092 | 2094 | 2096 | 2098 |

TABLE 8
Nucleic Acid Sequence Identifiers

| Antibody | SEQ ID NOs: | | | | | | | |
|---|---|---|---|---|---|---|---|---|
| Designation | HCVR | HCDR1 | HCDR2 | HCDR3 | LCVR | LCDR1 | LCDR2 | LCDR3 |
| H4H13290P2 | 1955 | 1957 | 1959 | 1961 | 2091 | 2093 | 2095 | 2097 |
| H4H13291P2 | 1963 | 1965 | 1967 | 1969 | 2091 | 2093 | 2095 | 2097 |
| H4H13295P2 | 1971 | 1973 | 1975 | 1977 | 2091 | 2093 | 2095 | 2097 |
| H4H13299P2 | 1979 | 1981 | 1983 | 1985 | 2091 | 2093 | 2095 | 2097 |
| H4H13300P2 | 1987 | 1989 | 1991 | 1993 | 2091 | 2093 | 2095 | 2097 |
| H4H13301P2 | 1995 | 1997 | 1999 | 2001 | 2091 | 2093 | 2095 | 2097 |
| H4H13302P2 | 2003 | 2005 | 2007 | 2009 | 2091 | 2093 | 2095 | 2097 |
| H4H13306P2 | 2011 | 2013 | 2015 | 2017 | 2091 | 2093 | 2095 | 2097 |
| H4H13309P2 | 2019 | 2021 | 2023 | 2025 | 2091 | 2093 | 2095 | 2097 |
| H4H13311P2 | 2027 | 2029 | 2031 | 2033 | 2091 | 2093 | 2095 | 2097 |
| H4H13312P2 | 2035 | 2037 | 2039 | 2041 | 2091 | 2093 | 2095 | 2097 |
| H4H13313P2 | 2043 | 2045 | 2047 | 2049 | 2091 | 2093 | 2095 | 2097 |
| H4H13316P2 | 2051 | 2053 | 2055 | 2057 | 2091 | 2093 | 2095 | 2097 |
| H4H13318P2 | 2059 | 2061 | 2063 | 2065 | 2091 | 2093 | 2095 | 2097 |
| H4H13319P2 | 2067 | 2069 | 2071 | 2073 | 2091 | 2093 | 2095 | 2097 |
| H4H13325P2 | 2075 | 2077 | 2079 | 2081 | 2091 | 2093 | 2095 | 2097 |
| H4H13331P2 | 2083 | 2085 | 2087 | 2089 | 2091 | 2093 | 2095 | 2097 |

[0718] Antibodies are typically referred to herein according to the following nomenclature: Fc prefix (e.g. “H-4H-”), followed by a numerical identifier (e.g. “13290,” “13291,” “13295,” etc.), followed by a “P2” suffix, as shown in Tables 7 and 8. Thus, according to this nomenclature, an antibody may be referred to herein as, e.g., “H41H13290P2,” “H4H13291P2,” “H41H13295P2,” etc. The prefix on the antibody designations used herein indicate the particular Fc region isotype of the antibody. In particular, an “H4H” antibody has a human IgG4 Fc (all variable regions are fully human as denoted by the first ‘H’ in the antibody designation). As will be appreciated by a person of ordinary skill in the art, an antibody having a particular Fc isotype can be converted to an antibody with a different Fc isotype (e.g., an antibody with a mouse IgG4 Fc can be converted to an antibody with a human IgG1, etc.), but in any event, the variable domains (including the CDRs)—which are indicated by the numerical identifiers shown in Tables 7 and 8—will remain the same, and the binding properties are expected to be identical or substantially similar regardless of the nature of the Fc domain.

### Antibody Conjugation

[0719] Techniques and linkers for conjugating to residues of an antibody or antigen binding fragment are known in the art. Exemplary amino acid attachments that can be used in the context of this aspect, e.g., lysine (see, e.g., U.S. Pat. No. 5,208,020; US 2010/0129314; Hollander et al., Bioconjugate Chem., 2008, 19:358-361; WO 2005/089808; U.S. Pat. No. 5,714,586; US 2013/0101546; and US 2012/0585592), cysteine (see, e.g., US 2007/0258987; WO 2013/055993; WO 2013/055990; WO 2013/053873; WO 2013/053872; WO 2011/130598; US 2013/0101546; and U.S. Pat. No. 7,750,116), selenoysteine (see, e.g., WO 2008/122039; and Hofer et al., Proc. Natl. Acad. Sci., USA, 2008, 105:12451-12456), formyl glycine (see, e.g., Carrico et al., Nat. Chem. Biol., 2007, 3:321-322; Agarwal et al., Proc. Natl. Acad. Sci., USA, 2013, 110:46-51, and Rabuka et al., Nat. Protocols, 2012, 10:1052-1067), non-natural amino acids (see, e.g., WO 2013/068874, and WO 2012/166559), and acidic amino acids (see, e.g., WO 2012/05982). Lysine conjugation can also proceed through NHS (N-hydroxy succinimide). Linkers can also be conjugated to cysteine residues, including cysteine residues of a cleaved interchain disulfide bond, by forming a carbon bridge between thiols (see, e.g., U.S. Pat. Nos. 9,951,141, and 9,950,076). Linkers can also be conjugated to an antigen-binding protein via attachment to carbohydrates (see, e.g., US 2008/0305497, WO 2014/065661, and Ryan et al., Food & Agriculture Immunol., 2001, 13:127-130) and disulfide linkers (see, e.g., WO 2013/085925, WO 2010/010324, WO 2011/018611, and Shaunak et al., Nat. Chem. Biol., 2006, 2:312-313). Site specific conjugation techniques can also be employed to direct conjugation to particular residues of the antibody or antigen binding protein (see, e.g., Schumacher et al. J Clin Immunol (2016) 36 (Suppl 1): 100). In specific embodiments discussed in more detail below, Site specific conjugation techniques, include glutamine conjugation via transglutaminase (see e.g., Schibli, Angew Chemie Inter Ed. 2010, 49,9995).

[0720] Payloads according to the disclosure linked through lysine and/or cysteine, e.g., via a maleimide or amide conjugation, are included within the scope of the present disclosure.

[0721] In some embodiments, the protein-drug conjugates of the present disclosure are produced according to a two-step process, where Step 1 is lysine-based linker conjugation, e.g., with an NHS-ester linker, and Step 2 is a payload conjugation reaction (e.g., a 1,3-cycloaddition reaction).

[0722] In some embodiments, the protein-drug conjugates of the present disclosure are produced according to a two-step process, where Step 1 is cysteine-based linker conjugation, e.g., with a maleimide linker, and Step 2 is a payload conjugation reaction (e.g., a 1,3-cycloaddition reaction).

[0723] In some embodiments, the protein-drug conjugates of the present disclosure are produced according to a two-step process, where Step 1 is transglutaminase-mediated site specific conjugation and Step 2 is a payload conjugation reaction (e.g., a 1,3-cycloaddition reaction).

### Step 1: Transglutaminase Mediated Site Specific Conjugation

[0724] In some embodiments, proteins (e.g., antibodies) may be modified in accordance with known methods to provide glutaminyl modified proteins. Techniques for conjugating antibodies and primary amine compounds are known in the art. Site specific conjugation techniques are employed herein to direct conjugation to glutamine using glutamine conjugation via transglutaminase (see e.g., Schibli, Angew Chemie Inter Ed. 2010, 49, 9995).

[0725] Primary amine-comprising compounds (e.g., linkers L1) of the present disclosure can be conjugated to one or more glutamine residues of a binding agent (e.g., a protein, e.g., an antibody) via transglutaminase-based chemo-enzymatic conjugation (see, e.g., Dennler et al., Protein Conjugate Chem. 2014, 25, 569-578, and WO 2017/147542). For example, in the presence of transglutaminase, one or more glutamine residues of an antibody can be coupled to a primary amine linker compound. Briefly, in some embodiments, a binding agent having a glutamine residue (e.g., a gln295, i.e. Q295 residue) is treated with a primary amine-containing linker LL, described above, in the presence of the enzyme transglutaminase. In certain embodiments, the binding agent is aglycosylated. In certain embodiments, the binding agent is deglycosylated.

[0726] In certain embodiments, the binding agent (e.g., a protein, e.g., an antibody) comprises at least one glutamine residue in at least one polypeptide chain sequence. In certain embodiments, the binding agent comprises two heavy chain polypeptides, each with one gln295 residue. In further embodiments, the binding agent comprises one or more glutamine residues at a site other than a heavy chain 295.

[0727] In some embodiments, a binding agent, such as an antibody, can be prepared by site-directed mutagenesis to insert a glutamine residue at a site without resulting in disabled antibody function or binding. For example, included herein are antibodies bearing Asn297Gln (N297Q) mutation(s) as described herein. In some embodiments, an antibody having a gln295 residue and/or an N297Q mutation contains one or more additional naturally occurring glutamine residues in their variable regions, which can be accessible to transglutaminase and therefore capable of conjugation to a linker or a linker-payload. An exemplary naturally occurring glutamine residue can be found, e.g., at Q55 of the light chain. In such instances, the binding agent, e.g., antibody, conjugated via transglutaminase can have a higher than expected LAR value (e.g., a LAR higher than 4). Any such antibodies can be isolated from natural or artificial sources.

[0728] In certain embodiments of the disclosure, the linker-antibody ratio or LAR is from 1, 2, 3, 4, 5, 6, 7, or 8 linker LL molecules per antibody. In some embodiments, the LAR is from 1 to 8. In some embodiments, the LAR is from 1 to 6. In certain embodiments, the LAR is from 2 to 4. In some cases, the LAR is from 2 to 3. In certain cases, the LAR is from 0.5 to 3.5. In some embodiments, the LAR is about 1, or about 1.5, or about 2, or about 2.5, or about 3, or about 3.5. In some embodiments, the LAR is 2. In some embodiments, the LAR is 4.

### Step 2: Payload Conjugation Reaction

[0729] In certain embodiments, linkers LL according to the present disclosure comprise at least one reactive group capable of further reaction after transglutamination. In these embodiments, the glutaminyl-modified protein (e.g., antibody) is capable of further reaction with a reactive payload compound or a reactive linker-payload compound (e.g., linker-payload compounds as disclosed herein), to form a protein-payload conjugate. More specifically, the reactive linker-payload compound may comprise a reactive group that is capable of reacting with the reactive group of the linker LL via a click chemistry reaction to form a click chemistry adduct. In certain embodiments, a reactive group according to the present disclosure comprises a moiety that is capable of undergoing a 1,3-cycloaddition reaction. In certain embodiments, the reactive group is an azide. In certain embodiments, the reactive group comprises an alkyne (e.g., a terminal alkyne, or an internal strained alkyne). In certain embodiments, the reactive group comprises a tetrazine. In certain embodiments, the reactive group comprises a strained alkene. In certain embodiments of the present disclosure the reactive group is compatible with the binding agent and transglutamination reaction conditions.

[0730] In one embodiment, the glutamine residue Gln is naturally present in a CH2 or CH3 domain of the BA. In another embodiment, the glutamine residue Gln is introduced to the BA by modifying one or more amino acids. In one embodiment, the Gln is Q295 or N297Q.

[0731] In one embodiment, the transglutaminase is microbial transglutaminase (MTG). In one embodiment, the transglutaminase is bacterial transglutaminase (BTG).

### Anti-HER2 Antibody-Drug Conjugates

[0732] In certain embodiments, the protein-drug conjugates, e.g., ADCs, disclosed herein are useful, inter alia, for the treatment, prevention and/or amelioration of any disease or disorder associated with or mediated by HER2 expression or activity, or treatable by binding HER2 without competing against modified LDL, or and/or promoting HER2 receptor internalization and/or decreasing cell surface receptor number.

[0733] The protein-drug conjugates of the present disclosure (and therapeutic compositions comprising the same) are useful, inter alia, for treating any disease or disorder in which stimulation, activation and/or targeting of an immune response would be beneficial. In particular, the anti-HER2 protein-drug conjugates, including both monospecific anti-HER2 antibodies and bispecific anti-HER2/HER2 antibodies of the present disclosure can be used for the treatment, prevention and/or amelioration of any disease or disorder associated with or mediated by HER2 expression or activity or the proliferation of HER2+ cells. The mechanism of action by which the therapeutic methods of the present disclosure are achieved include killing of the cells expressing HER2 in the presence of effector cells, for example, by CDC, apoptosis, ADCC, phagocytosis, or by a combination of two or more of these mechanisms. Cells expressing HER2 which can be inhibited or killed using the protein-drug conjugates of the present disclosure include, for example, breast tumor cells.

[0734] In one embodiment, the protein-drug conjugates of the present disclosure (and therapeutic compositions and dosage forms comprising same) comprise a bispecific antigen-binding molecule comprising:
[0735] a first antigen-binding domain (D1); and
[0736] a second antigen-binding domain (D2);
[0737] wherein D1 specifically binds a first epitope of human HER2; and
[0738] wherein D2 specifically binds a second epitope of human HER2.

[0739] In one embodiment of the above, D1 and D2 do not compete with one another for binding to human HER2.

[0740] The protein-drug conjugates of the present disclosure can be used to treat, e.g., primary and/or metastatic tumors arising in the prostate, bladder, cervix, lung, colon, kidney, breast, pancreas, stomach, uterus, and/or ovary. In certain embodiments, the protein-drug conjugates of the present disclosure are used to treat one or more of the following cancers: prostate cancer, bladder cancer, cervical cancer, lung cancer, colon cancer, kidney cancer, breast cancer, pancreatic cancer, stomach cancer, uterine cancer, and ovarian cancer. According to certain embodiments of the present disclosure, the anti-HER2 antibodies or anti-HER2/HER2 bispecific antibodies are useful for treating a patient afflicted with a breast cancer cell that is IHC2+ or more. According to other related embodiments of the present disclosure, methods are provided comprising administering an anti-HER2 antibody or an anti-HER2/HER2 antibody as disclosed herein to a patient who is afflicted with a breast cancer cell that is IHC2+ or more. Analytic/diagnostic methods known in the art, such as tumor scanning, etc., can be used to ascertain whether a patient harbors a tumor that is castrate-resistant.

[0741] In certain embodiments, the present disclosure also includes methods for treating residual cancer in a subject. The term “residual cancer” means the existence or persistence of one or more cancerous cells in a subject following treatment with an anti-cancer therapy.

[0742] The protein-drug conjugates of the present disclosure (and therapeutic compositions comprising the same) are useful, inter alia, for treating any disease or disorder in which stimulation, activation and/or targeting of an immune response would be beneficial. In particular, protein-drug conjugates comprising the anti-HER2 antibodies or anti HER2/HER2 antibodies of the present disclosure can be used for the treatment, prevention and/or amelioration of any disease or disorder associated with or mediated by HER2 expression or activity or the proliferation of HER2+ cells. The mechanism of action by which the therapeutic methods of the present disclosure are achieved include killing of the cells expressing HER2 in the presence of effector cells, for example, by CDC, apoptosis, ADCC, phagocytosis, or by a combination of two or more of these mechanisms. Cells expressing HER2 which can be inhibited or killed using the protein-drug conjugates of the present disclosure include, for example, breast tumor cells.

[0743] According to certain aspects, the present disclosure provides methods for treating a disease or disorder associated with HER2 expression (e.g., breast cancer) comprising administering one or more of the anti-HER2 protein-drug conjugates or anti-HER2/HER2 bispecific protein-drug conjugates described elsewhere herein to a subject after the subject has been determined to have breast cancer (e.g., and IHC2+ breast cancer). For example, the present disclosure includes methods for treating breast cancer comprising administering protein-drug conjugate comprising an anti-HER2 antibody or antigen-binding molecule or an anti-HER2/HER2 bispecific antibody or antigen-binding molecule to a patient 1 day, 2 days, 3 days, 4 days, 5 days, 6 days, 1 week, 2 weeks, 3 weeks or 4 weeks, 2 months, 4 months, 6 months, 8 months, 1 year, or more after the subject has received hormone therapy (e.g., anti-androgen therapy).

[0744] In certain embodiments, the present disclosure also includes the use of an anti-HER2 antibody of the present disclosure in the manufacture of a medicament for the treatment of a disease or disorder (e.g., cancer) related to or caused by HER2-expressing cells. In one aspect, the present disclosure relates to a protein-drug conjugate comprising an anti-HER2 antibody or antigen-binding fragment or an anti-HER2/HER2 bispecific antibody or antigen-binding fragment, as disclosed herein, for use in medicine. In one aspect, the present disclosure relates to a compound comprising an antibody-drug conjugate (ADC) as disclosed herein, for use in medicine.

### Anti-STEAP2 Antibody-Drug Conjugates

[0745] In certain embodiments, the protein-drug conjugates, e.g., ADCs, disclosed herein are useful, inter alia, for the treatment, prevention and/or amelioration of any disease or disorder associated with or mediated by STEAP2 expression or activity, or treatable by binding STEAP2 without competing against modified LDL, or and/or promoting STEAP2 receptor internalization and/or decreasing cell surface receptor number.

[0746] The protein-drug conjugates of the present disclosure (and therapeutic compositions comprising the same) are useful, inter alia, for treating any disease or disorder in which stimulation, activation and/or targeting of an immune response would be beneficial. In particular, the anti-STEAP2 protein-drug conjugates of the present disclosure can be used for the treatment, prevention and/or amelioration of any disease or disorder associated with or mediated by STEAP2 expression or activity or the proliferation of STEAP2+ cells. The mechanism of action by which the therapeutic methods of the present disclosure are achieved include killing of the cells expressing STEAP2 in the presence of effector cells, for example, by CDC, apoptosis, ADCC, phagocytosis, or by a combination of two or more of these mechanisms. Cells expressing STEAP2 which can be inhibited or killed using the protein-drug conjugates of the present disclosure include, for example, prostate tumor cells.

[0747] The protein-drug conjugates of the present disclosure can be used to treat, e.g., primary and/or metastatic tumors arising in the prostate, bladder, cervix, lung, colon, kidney, breast, pancreas, stomach, uterus, and/or ovary. In certain embodiments, the protein-drug conjugates of the present disclosure are used to treat one or more of the following cancers: prostate cancer, bladder cancer, cervical cancer, lung cancer, colon cancer, kidney cancer, breast cancer, pancreatic cancer, stomach cancer, uterine cancer, and ovarian cancer. Analytic/diagnostic methods known in the art, such as tumor scanning, etc., can be used to ascertain whether a patient harbors a tumor that is castrate-resistant.

[0748] In certain embodiments, the present disclosure also includes methods for treating residual cancer in a subject. The term “residual cancer” means the existence or persistence of one or more cancerous cells in a subject following treatment with an anti-cancer therapy.

[0749] According to certain aspects, the present disclosure provides methods for treating a disease or disorder associated with STEAP2 expression (e.g., prostate cancer) comprising administering one or more of the anti-STEAP2 protein-drug conjugates described elsewhere herein to a subject after the subject has been determined to have prostate cancer. For example, the present disclosure includes methods for treating prostate cancer comprising administering protein-drug conjugate comprising an anti-STEAP2 antibody or antigen-binding molecule to a patient 1 day, 2 days, 3 days, 4 days, 5 days, 6 days, 1 week, 2 weeks, 3 weeks or 4 weeks, 2 months, 4 months, 6 months, 8 months, 1 year, or more after the subject has received hormone therapy (e.g., anti-androgen therapy).

[0750] In certain embodiments, the present disclosure also includes the use of an anti-STEAP2 antibody of the present disclosure in the manufacture of a medicament for the treatment of a disease or disorder (e.g., cancer) related to or caused by STEAP2-expressing cells. In one aspect, the present disclosure relates to a protein-drug conjugate comprising an anti-STEAP2 antibody or antigen-binding fragment, as disclosed herein, for use in medicine. In one aspect, the present disclosure relates to a compound comprising an antibody-drug conjugate (ADC) as disclosed herein, for use in medicine.

### Anti-MET Antibody-Drug Conjugates

[0751] In certain embodiments, the protein-drug conjugates, e.g., ADCs, disclosed herein are useful, inter alia, for the treatment, prevention and/or amelioration of any disease or disorder associated with or mediated by MET expression or activity, or treatable by binding MET without competing against modified LDL, or and/or promoting MET receptor internalization and/or decreasing cell surface receptor number.

[0752] The protein-drug conjugates of the present disclosure (and therapeutic compositions comprising the same) are useful, inter alia, for treating any disease or disorder in which stimulation, activation and/or targeting of an immune response would be beneficial. In particular, the anti-MET or anti MET/MET bispecific protein-drug conjugates of the present disclosure can be used for the treatment, prevention and/or amelioration of any disease or disorder associated with or mediated by MET expression or activity or the proliferation of MET+ cells. The mechanism of action by which the therapeutic methods of the present disclosure are achieved include killing of the cells expressing MET in the presence of effector cells, for example, by CDC, apoptosis, ADCC, phagocytosis, or by a combination of two or more of these mechanisms. Cells expressing MET which can be inhibited or killed using the protein-drug conjugates of the present disclosure include, for example, lung tumor cells.

[0753] The protein-drug conjugates of the present disclosure can be used to treat, e.g., primary and/or metastatic tumors arising in the prostate, bladder, cervix, lung, colon, kidney, breast, pancreas, stomach, uterus, and/or ovary. In certain embodiments, the protein-drug conjugates of the present disclosure are used to treat one or more of the following cancers: prostate cancer, bladder cancer, cervical cancer, lung cancer, colon cancer, kidney cancer, breast cancer, pancreatic cancer, stomach cancer, uterine cancer, and ovarian cancer. Analytic/diagnostic methods known in the art, such as tumor scanning, etc., can be used to ascertain whether a patient harbors a tumor that is castrate-resistant.

[0754] In certain embodiments, the present disclosure also includes methods for treating residual cancer in a subject. The term “residual cancer” means the existence or persistence of one or more cancerous cells in a subject following treatment with an anti-cancer therapy.

[0755] According to certain aspects, the present disclosure provides methods for treating a disease or disorder associated with MET expression (e.g., lung cancer) comprising administering one or more of the anti-MET or anti MET/MET bispecific protein-drug conjugates described elsewhere herein to a subject after the subject has been determined to have lung cancer. For example, the present disclosure includes methods for treating lung cancer comprising administering protein-drug conjugate comprising an anti-MET or anti MET/MET bispecific antibody or antigen-binding molecule to a patient 1 day, 2 days, 3 days, 4 days, 5 days, 6 days, 1 week, 2 weeks, 3 weeks or 4 weeks, 2 months, 4 months, 6 months, 8 months, 1 year, or more after the subject has received hormone therapy (e.g., anti-androgen therapy).

[0756] For example, anti-MET antibody-drug conjugates and MET×MET bispecific antibody-drug conjugates of the present disclosure are useful for the treatment of tumors that express (or overexpress) MET. For example, the anti-MET antibody-drug conjugates and MET×MET bispecific antibody-drug conjugates may be used to treat primary and/or metastatic tumors arising in the brain and meninges, oropharynx, lung and bronchial tree, gastrointestinal tract, male and female reproductive tract, muscle, bone, skin and appendages, connective tissue, spleen, immune system, blood forming cells and bone marrow, liver and urinary tract, and special sensory organs such as the eye. In certain embodiments, the anti-MET antibody-drug conjugates and MET×MET bispecific antibody-drug conjugates are used to treat one or more of the following cancers: acute myelogenous leukemia, adult T-cell leukemia, astrocytomas, bladder cancer, breast cancer, cervical cancer, cholangiocarcinoma, chronic myeloid leukemia, colorectal cancer, endometrial cancer, esophageal cancer, gastric cancer (e.g., gastric cancer with MET amplification), glioblastomata, head and neck cancer (e.g., head and neck squamous cell carcinoma [HNSCC]), Kaposi's sarcoma, kidney cancer, leiomyosarcomas, liver cancer, lung cancer (e.g., non-small cell lung cancer [NSCLC]), lymphomas, malignant gliomas, malignant mesothelioma, melanoma, mesothelioma, MFH/fibrosarcoma, multiple myeloma, nasopharyngeal cancer, osteosarcoma, ovarian cancer, pancreatic carcinoma, prostate cancer, renal cell carcinoma, rhabdomyosarcoma, small cell lung cancer, synovial sarcoma, thyroid cancer, and Wilms' tumor.

[0757] In certain embodiments, the present disclosure also includes the use of an anti-MET antibody-drug conjugate or a MET×MET bispecific antibody-drug conjugate of the present disclosure in the manufacture of a medicament for the treatment of a disease or disorder (e.g., cancer) related to or caused by MET-expressing cells. In one aspect, the present disclosure relates to a protein-drug conjugate comprising an anti-MET antibody-drug conjugate or a MET×MET bispecific antibody-drug conjugate, as disclosed herein, for use in medicine. In one aspect, the present disclosure relates to a compound comprising an antibody-drug conjugate (ADC) as disclosed herein, for use in medicine.

### Combination Therapies and Formulations

[0758] The present disclosure provides methods which comprise administering a pharmaceutical composition comprising any of the exemplary protein-drug conjugates (e.g., antibody-drug conjugates), linker-payloads and payloads described herein in combination with one or more additional therapeutic agents. Exemplary additional therapeutic agents that may be combined with or administered in combination with protein-drug conjugates (e.g., antibody-drug conjugates), linker-payloads and payloads of the present disclosure include, e.g., a HER2 antagonist (e.g., an anti-HER2 antibody [e.g., trastuzumab] or a small molecule inhibitor of HER2 or an anti-HER2 antibody-drug conjugate, or an anti-HER2/HER2 bispecific antibody or an anti-HER2/HER2 bispecific antibody-drug conjugate), an EGFR antagonist (e.g., an anti-EGFR antibody [e.g., cetuximab or panitumumab] or small molecule inhibitor of EGFR [e.g., gefitinib or erlotinib]), an antagonist of another EGFR family member such as HER2/ErbB2, ErbB3 or ErbB4 (e.g., anti-ErbB2, anti-ErbB3 or anti-ErbB4 antibody or small molecule inhibitor of ErbB2, ErbB3 or ErbB4 activity), an antagonist of EGFRvIII (e.g., an antibody that specifically binds EGFRvIII), a cMET antagonist (e.g., an anti-cMET antibody), an IGF1R antagonist (e.g., an anti-IGF1R antibody), a B-raf inhibitor (e.g., vemurafenib, sorafenib, gDC-0879, PLX-4720), a PDGFR-α inhibitor (e.g., an anti-PDGFR-α antibody), a PDGFR-β inhibitor (e.g., an anti-PDGFR-β antibody), a VEGF antagonist (e.g., a VEGF-Trap, see, e.g., U.S. Pat. No. 7,087,411 (also referred to herein as a “VEGF-inhibiting fusion protein”), anti-VEGF antibody (e.g., bevacizumab), a small molecule kinase inhibitor of VEGF receptor (e.g., sunitinib, sorafenib or pazopanib)), a DLL4 antagonist (e.g., an anti-DLL4 antibody disclosed in US 2009/0142354), an Ang2 antagonist (e.g., an anti-Ang2 antibody disclosed in US 2011/0027286 such as H1H685P), a FOLH1 (PSMA) antagonist, a PRLR antagonist (e.g., an anti-PRLR antibody), a STEAP1 or STEAP2 antagonist (e.g., an anti-STEAP1 antibody or an anti-STEAP2 antibody), a TMPRSS2 antagonist (e.g., an anti-TMPRSS2 antibody), a MSLN antagonist (e.g., an anti-MSLN antibody), a CA9 antagonist (e.g., an anti-CA9 antibody), a uroplakin antagonist (e.g., an anti-uroplakin antibody), etc.

[0759] Other agents that may be beneficially administered in combination with the protein-drug conjugates (e.g., antibody-drug conjugates), linker-payloads and payloads of the disclosure include cytokine inhibitors, including small-molecule cytokine inhibitors and antibodies that bind to cytokines such as IL-1, IL-2, IL-3, IL-4, IL-5, IL-6, IL-8, IL-9, IL-11, IL-12, IL-13, IL-17, IL-18, or to their respective receptors. The pharmaceutical compositions of the present disclosure (e.g., pharmaceutical compositions comprising an anti-HER2, an anti-HER2/HER2 bispecific, an anti-MET, an anti-MET/MET bispecific, or an anti-STEAP2 protein-drug conjugate (e.g., antibody-drug conjugate as disclosed herein) may also be administered as part of a therapeutic regimen comprising one or more therapeutic combinations selected from “ICE”: ifosfamide (e.g., Ifex®), carboplatin (e.g., Paraplatin®), etoposide (e.g., Etopophos®, Toposar®, VePesid®, VP-16); “DHAP”: dexamethasone (e.g., Decadron®), cytarabine (e.g., Cytosar-U®, cytosine arabinoside, ara-C), cisplatin (e.g., Platinol®-AQ); and “ESHAP”: etoposide (e.g., Etopophos®, Toposar®, VePesid®, VP-16), methylprednisolone (e.g., Medrol®), high-dose cytarabine, cisplatin (e.g., Platinol®-AQ).

[0760] The present disclosure also includes therapeutic combinations comprising any of the protein-drug conjugates (e.g., antibody-drug conjugates), linker-payloads and payloads mentioned herein and an inhibitor of one or more of HER2, VEGF, Ang2, DLL4, EGFR, ErbB2, ErbB3, ErbB4, EGFRvIII, cMet, IGF1R, B-raf, PDGFR-α, PDGFR-β, FOLH1 (PSMA), PRLR, STEAP1, STEAP2, TMPRSS2, MSLN, CA9, uroplakin, or any of the aforementioned cytokines, wherein the inhibitor is an aptamer, an antisense molecule, a ribozyme, an siRNA, a peptibody, a nanobody or an antibody fragment (e.g., Fab fragment; F(ab′)2 fragment; Fd fragment; Fv fragment; scFv; dAb fragment; or other engineered molecules, such as diabodies, triabodies, tetrabodies, minibodies and minimal recognition units). The antigen-binding molecules of the disclosure may also be administered and/or co-formulated in combination with antivirals, antibiotics, analgesics, corticosteroids and/or NSAIDs. The antigen-binding molecules of the disclosure may also be administered as part of a treatment regimen that also includes radiation treatment and/or conventional chemotherapy.

[0761] The additional therapeutically active component(s) may be administered just prior to, concurrent with, or shortly after the administration of an antigen-binding molecule of the present disclosure; (for purposes of the present disclosure, such administration regimens are considered the administration of an antigen-binding molecule “in combination with” an additional therapeutically active component).

[0762] The present disclosure includes pharmaceutical compositions in which protein-drug conjugates (e.g., antibody-drug conjugates), linker-payloads and/or payloads of the present disclosure are co-formulated with one or more of the additional therapeutically active component(s) as described elsewhere herein.

### Administration Regimens

[0763] According to certain embodiments of the present disclosure, multiple doses of a protein-drug conjugate (e.g., an anti-HER2, an anti-HER2/HER2 bispecific, an anti-MET, an anti-MET/MET bispecific, or an anti-STEAP2 antibody-drug conjugate), linker-payload and/or a payload may be administered to a subject over a defined time course. The methods according to this aspect of the disclosure comprise sequentially administering to a subject multiple doses of a protein-drug conjugate (e.g., an anti-HER2, an anti-HER2/HER2 bispecific, an anti-MET, an anti-MET/MET bispecific, or an anti-STEAP2 antibody-drug conjugate), linker-payload and/or a payload of the disclosure. As used herein, “sequentially administering” means that each dose of a protein-drug conjugate (e.g., an anti-HER2, an anti-HER2/HER2 bispecific, an anti-MET, an anti-MET/MET bispecific, or an anti-STEAP2 antibody-drug conjugate), linker-payload and/or a payload is administered to the subject at a different point in time, e.g., on different days separated by a predetermined interval (e.g., hours, days, weeks or months). The present disclosure includes methods which comprise sequentially administering to the patient a single initial dose of a protein-drug conjugate (e.g., an anti-HER2, an anti-HER2/HER2 bispecific, an anti-MET, an anti-MET/MET bispecific, or an anti-STEAP2 antibody-drug conjugate), linker-payload and/or a payload, followed by one or more secondary doses of the protein-drug conjugate (e.g., an anti-HER2, an anti-HER2/HER2 bispecific, an anti-MET, an anti-MET/MET bispecific, or an anti-STEAP2 antibody-drug conjugate), linker-payload and/or payload, and optionally followed by one or more tertiary doses of the a protein-drug conjugate (e.g., an anti-HER2, an anti-HER2/HER2 bispecific, an anti-MET, an anti-MET/MET bispecific, or an anti-STEAP2 antibody-drug conjugate), linker-payload and/or payload.

[0764] The terms “initial dose,” “secondary doses,” and “tertiary doses,” refer to the temporal sequence of administration of the protein-drug conjugate (e.g., an anti-HER2, an anti-HER2/HER2 bispecific, an anti-MET, an anti-MET/MET bispecific, or an anti-STEAP2 antibody-drug conjugate), linker-payload and/or payload of the disclosure. Thus, the “initial dose” is the dose which is administered at the beginning of the treatment regimen (also referred to as the “baseline dose”); the “secondary doses” are the doses which are administered after the initial dose; and the “tertiary doses” are the doses which are administered after the secondary doses. The initial, secondary, and tertiary doses may all contain the same amount of the protein-drug conjugate (e.g., an anti-HER2, or an anti-HER2/HER2 bispecific, an anti-MET, an anti-MET/MET bispecific, or an anti-STEAP2 antibody-drug conjugate), linker-payload and/or payload, but generally may differ from one another in terms of frequency of administration. In certain embodiments, however, the amount of the protein-drug conjugate (e.g., an anti-HER2, an anti-HER2/HER2 bispecific, an anti-MET, an anti-MET/MET bispecific, or an anti-STEAP2 antibody-drug conjugate), linker-payload and/or payload contained in the initial, secondary and/or tertiary doses varies from one another (e.g., adjusted up or down as appropriate) during the course of treatment. In certain embodiments, two or more (e.g., 2, 3, 4, or 5) doses are administered at the beginning of the treatment regimen as “loading doses” followed by subsequent doses that are administered on a less frequent basis (e.g., “maintenance doses”).

[0765] In one exemplary embodiment of the present disclosure, each secondary and/or tertiary dose is administered 1 to 26 (e.g., 1, 1%, 2, 2%, 3, 3%, 4, 4%, 5, 5%, 6, 6%, 7, 7%, 8, 8%, 9, 9%, 10, 10%, 11, 11%, 12, 12%, 13, 13%, 14, 14%, 15, 15%, 16, 16%, 17, 17%, 18, 18%, 19, 19%, 20, 20%, 21, 21%, 22, 22%, 23, 23%, 24, 24%, 25, 25%, 26, 26%, or more) weeks after the immediately preceding dose. The phrase “the immediately preceding dose,” as used herein, means, in a sequence of multiple administrations, the dose of a protein-drug conjugate (e.g., an anti-HER2, an anti-HER2/HER2 bispecific, an anti-MET, an anti-MET/MET bispecific, or an anti-STEAP2 antibody-drug conjugate), linker-payload and/or payload which is administered to a patient prior to the administration of the very next dose in the sequence with no intervening doses.

[0766] The methods according to this aspect of the disclosure may comprise administering to a patient any number of secondary and/or tertiary doses of a protein-drug conjugate (e.g., an anti-HER2, an anti-HER2/HER2 bispecific, an anti-MET, an anti-MET/MET bispecific, or an anti-STEAP2 antibody-drug conjugate), linker-payload and/or payload. For example, in certain embodiments, only a single secondary dose is administered to the patient. In other embodiments, two or more (e.g., 2, 3, 4, 5, 6, 7, 8, or more) secondary doses are administered to the patient. Likewise, in certain embodiments, only a single tertiary dose is administered to the patient. In other embodiments, two or more (e.g., 2, 3, 4, 5, 6, 7, 8, or more) tertiary doses are administered to the patient.

[0767] In embodiments involving multiple secondary doses, each secondary dose may be administered at the same frequency as the other secondary doses. For example, each secondary dose may be administered to the patient 1 to 2 weeks after the immediately preceding dose. Similarly, in embodiments involving multiple tertiary doses, each tertiary dose may be administered at the same frequency as the other tertiary doses. For example, each tertiary dose may be administered to the patient 2 to 4 weeks after the immediately preceding dose. Alternatively, the frequency at which the secondary and/or tertiary doses are administered to a patient can vary over the course of the treatment regimen. The frequency of administration may also be adjusted during the course of treatment by a physician depending on the needs of the individual patient following clinical examination.

### Examples

[0768] The following examples illustrate specific aspects of the instant description. The examples should not be construed as limiting, as the examples merely provide specific understanding and practice of the embodiments and their various aspects.

### Abbreviations

| Abbreviation | Term |
|---|---|
| aq | aqueous |
| Conc. | concentrated/concentration |
| COT | cyclooctyne |
| CPT | Camptothecins |
| DBU | 1,8-diazabicyclo[5.4.0]undec-7-ene |
| DCC | dicyclohexylcarbodiimide |
| DCE | 1,2-dichloroethane |
| DCM | dichloromethane |
| DCU | N,N′-dicyclohexylurea |
| DIPEA | diisopropylethyl amine |
| DMF | N,N-dimethylformamide |
| DMSO | dimethylsulfoxide |
| DXd | deruxtecan |
| Fmoc | (9H-fluoren-9-yl)methyl carbono |
| g/kg | gram/kilogram |
| Gly | glycine |
| HATU | 2-(7-azabenzotriazol-1-yl)-N,N,N′,N′-tetramethyluronium |
| | hexafluorophosphate |
| HOAt | 1-hydroxy-7-azabenzotriazole |
| HOBt | 1-hydroxybenzotriazole |
| HOSu | N-hydroxysuccinimide |
| HPLC | high performance liquid chromatography |
| HYP | 2-hydroxypyridine |
| L | liters |
| LC | liquid chromatography |
| M/mM | molar/millimolar |
| MeHYQ | 4-methyl-2-hydroxyquinoline |
| MS | mass spectrometry |
| MTBE | methyl tert-butyl ether |
| NMR | nuclear magnetic resonance |
| Oxyma Pure | ethyl cyanoglyoxylate-2-oxime |
| PEG | polyethylene glycol |
| PMA | phosphomolybdic acid hydrate |
| PNP | bis(4-nitrophenyl) carbonate |
| ppm | parts per million (chemical shift) |
| PPTS | pyridium p-toluenesulfonate |
| RP | reversed phase |
| Sat. | saturated |
| TFA | trifluoroacetic acid |
| THF | tetrahydrofuran |
| TLC | thin layer chromatography |
| Top | topoisomerase |
| vcPAB | Val-Cit-para-aminobenzylalcohol |
| wt | weight |

### General Methods

### Example 1. Synthesis of Payloads

[0770] Two synthetic routes were designed to make prodrugs of DXd shown in Scheme 1.
[0771] Route A was using Exatecan reacting with 4, see Scheme 2A.
[0772] Route B was using DXd reacting with 3, see Scheme 2B.

[chemical structure]

[chemical structure]

[chemical structure]

[chemical structure]

[chemical structure]

### Example 2. Synthesis of Linker-Payloads

[0773] Five synthetic routes are summarized in Scheme 3, below, based on the last step in the route. All building blocks (A to F) have suitable reactive moieties to be used in the reactions. The synthetic schemes of the building blocks and the final linker-payloads are illustrated as follows.
[0774] Route 1 was using fragment F with Exatecan.
[0775] Route 2 was using fragment E with DXd.
[0776] Route 3 was using fragment D with Prodrug or Fmoc protected ProDrug.
[0777] Route 4 was using fragment B with vcPABC-ProDrug
[0778] Route 5 was using fragment A with PEG4-vcPABC-ProDrug

[chemical structure]

[0779] Intermediates A and B can be purchased commercially or reported building blocks which have functional groups that can be conjugated with antibody by, e.g., a bio-orthogonal (“click”) reaction (Table A).

TABLE A
Linker-payload with generic reactive moiety A

| | | | | | | Inter- | |
|---|---|---|---|---|---|---|---|
| | | | | | | mediate B | |
| | | | | | | Y-W-PEGn- | |
| | | | | | | COOH or its | |
| | | Group | Intermediate A | | | active ester | |
| Abbr. | Group A | W | # | Structure of A | CAS# | # | CAS# |
| COT | [chemical structure] | NH | Aa | [chemical structure] | 1425803- 45-7 | Ba | 1802907- 91-0 |
| DIBAC | [chemical structure] | NH | Ae | [chemical structure] | 1353016- 71-3 | Be | 1537170- 85-6 |
| DIBAC- NH | [chemical structure] | CO | Ak | [chemical structure] | 1255942- 06-3 | Bk | 2110448- 99-0 |
| Mc | [chemical structure] | NH | Af | [chemical structure] | 55750- 61-3 | Bf | 1954756- 73-0 |
| BCN | [chemical structure] | NH | Ag | [chemical structure] | 1263166- 91-1 | Bg | 1881221- 47-1 |
| Norbor- neneol | [chemical structure] | NH | Ah | [chemical structure] | 2206682- 09-7 | | |
| Cyclo- propene- OH | [chemical structure] | NH | Ai | [chemical structure] | 1515861- 58-1 | | |
| Cyclo- propene- COOH | [chemical structure] | NH | Aj | [chemical structure] | 39492- 17-6 | | |
| MeTz- Ph | [chemical structure] | O | Ab | [chemical structure] | 58884- 35-8 | Bb | 1802907- 91-0 |
| TCO | [chemical structure] | NH | Ac | [chemical structure] | 1380416- 34-1 | Bc | 1897439- 90-5 |
| MeTz- PhAc | [chemical structure] | NH | Ad | [chemical structure] | 1380500- 88-8 | Bd | NA |
| MeTz- Bn-NH | [chemical structure] | CO | Al | [chemical structure] | 1345955- 28-3 | | |
| Tz-Bn- NH | [chemical structure] | CO | Am | [chemical structure] | 1092689- 33-2 | | |

[chemical structure]

[0780] [condition] Exatecan, HATU, DIPEA, DMF, 25° C., 16 hours.

[chemical structure]

[0781] [condition] DXd, Tf₂NH, 4A MS, THF, 20° C., 10 min.

[chemical structure]

[0782] [condition] intermediate D, coupling catalyst 4-Hydroxy-2-methylquinoline (MeHYQ), DIPEA, DMF, rt., 2 hours

[chemical structure]

[0783] [condition] intermediate D, coupling catalyst 4-Hydroxy-2-methylquinoline (MeHYQ), Et₃N, DBU, DMF, 50° C., 6 hours.

[chemical structure]

[0784] [condition] step 1, a) Fmoc-vcPAB-PNP, coupling reagent 4-Hydroxy-2-methylquinoline (MeHYQ), DIPEA, DMF, rt., 4 h.; b) Et₂NH, DMF, rt., 2 h. step2, intermediate B, HATU, DIPEA, DMF, rt., 4 h.

[chemical structure]

[chemical structure]

[chemical structure]

[chemical structure]

[chemical structure]

[chemical structure]

### Example 3. Synthesis of Key Intermediates/Building Blocks

[0785] Intermediate A was prepared according to Scheme 6 and the below descriptions.

[chemical structure]

[0786] The synthesis of intermediate A-4 (COT) was reported in WO2010106245, and the synthesis of intermediate A was reported in WO2015143092, both of which are incorporated by reference herein in their entirety. (Scheme 6)

[0787] Intermediate B was prepared according to Scheme 7 and the below descriptions.

[chemical structure]

[0788] The synthesis of intermediate B was reported in WO2019094395 and described in Scheme 7, above.

[0789] The synthesis of intermediate 4a-h is described in Scheme 2A, above. Intermediate 4a is reported in WO2015146132 (Scheme 8). Alternatively, intermediate 4a was prepared by a 2-step synthesis with a 45% overall yield without chromatographic purification.

[chemical structure]

[0790] Alternatively, 4a was prepared at a larger scale by the following two-step procedure*:

[chemical structure]

*wherein [Step 1] Cu(OAc)₂ (0.30 eq.), Pb(OAc)₄ (1.5-2.0 eq.), pyridine (2.0 eq.), THF, 25° C., 16 hours, 60% yield (for 0.80 kg); [Step 2] glycolic acid, 1,2-dichloroethane, pyridium p-toluenesulfonate (PPTS), 45-50° C., 18 hours, 75% yield (for 0.96 kg).

[chemical structure]

[0791] [condition] step 1, Cu(OAc)₂ (0.30 eq.), Pb(OAc)₄ (1.5-2.0 eq.), pyridine (2.0 eq.), THF, 25° C., 16 hours; step 2, glycolic acid, 1,2-dichloroethane, pyridium p-toluenesulfonate (PPTS), 45-50° C., 18 hours.

[0792] Two synthetic routes were summarized to make intermediate D in Scheme 10. All building blocks have suitable reactive moieties to be used in the reactions. The synthetic schemes of the building blocks and the final intermediate D are illustrated as follows.

[chemical structure]

[0793] Route Da was from A to A-PEG4 (B), to A-PEG4-vcPAB, to A-PEG4-vcPAB-PNP (D).
[0794] Route db was from A with A-PEG4-vcPAB (B), then to A-PEG4-vcPAB-PNP (D)

[chemical structure]

[chemical structure]

[chemical structure]

[0795] [step 1] a) compound 2, DBU, Et₃N, DMF, 25° C., 16 hr.; b) intermediate D, HOAt, DIPEA, 25° C., 4 hr.;
[0796] [step 2] Pb(OAc), HOAc, DMF, 25° C., 16 hr

[chemical structure]

[0797] [STEP 1] a) intermediate 4, triethylamine, DBU, DMF, 25° C., 16 h, b) HOAt, intermediate D, 25° C., 16 hours.

[chemical structure]

[chemical structure]

### Example 4. Conjugations

[0798] Site-specific ADCs conjugation is shown in FIG. 5.

[0799] Step 1 is site-specific conjugation of Handle-functionalized amine with an Antibody generated a drug conjugate containing 2, 4 or 8 handles per antibody. Here, AL=non-branched Handle-functionalized amine, BL=branched Handle-functionalized amine.

[0800] Step 2 is a click reaction between Handle-functionalized antibodies and a Linker-Payload (LP) to generate the site-specific ADCs.

### Synthesis of Payloads

### Example 5. General Synthesis of ProDXds (Scheme 2A)

[0801] General procedures of synthesis of compounds 2s

[0802] To a stirred solution of Fmoc protected amino-acid 1 (1 equiv.) in DCM (0.2 M) were added HOSu (2.2 equiv.) and EDCI (2.2 equiv.), and the reaction mixture was stirred at room temperature for 2 hours to 16 hours, which was monitored by LCMS. The mixture was diluted with DCM, washed with water (3×) and brine, dried over anhydrous sodium sulfate and concentrated in vacuo. The residue was dissolved in DMF (0.2 M). To the solution were added corresponding amino-acid (R³NHCHR⁴COOH) (1.0 equiv.) and DIPEA (3.0 equiv.), and the reaction mixture was stirred at room temperature for an hour, which was monitored by LCMS. The volatiles were removed in vacuo and the residue solution was directly purified by reversed phase flash chromatography (0-100% acetonitrile in aq. TFA (0.03%)) to give compound 2 (37-70% yield) as a white solid.

### 2-[2-({[(9H-fluoren-9-yl)methoxy]carbonyl}amino)acetamido]acetic acid (2a)

[chemical structure]

[0804] Commercially available.

### 2-[(2S)-3-[(tert-butyldimethylsilyl)oxy]-2-({[(9H-fluoren-9-yl)methoxy]carbonyl}amino)propanamido]acetic acid (2b)

[chemical structure]

[0806] Following the general procedure, compound 2b (0.50 g, 54% yield) was obtained as a white solid. ESI m/z: 499 (M+H)⁺.

### 2-[(2S)-5-(benzyloxy)-2-({[(9H-fluoren-9-yl)methoxy]carbonyl}amino)-5-oxopentanamido]acetic acid (2c)

[chemical structure]

[0808] Following the general procedure, compound 2c (0.65 g, 58% yield) was obtained as a white solid. ESI m/z: 517 (M+H)⁺.

### 2-[(2S)-6-azido-2-({[(9H-fluoren-9-yl)methoxy]carbonyl}amino)hexanamido]acetic acid (2d)

[chemical structure]

[0810] Following the general procedure, compound 2d (0.66 g, 70% yield) was obtained as a white solid. ESI m/z: 452 (M+H)⁺.

### 2-[(2S)-2-({[(9H-fluoren-9-yl)methoxy]carbonyl}amino)-3-phenylpropanamido]acetic acid (2e)

[chemical structure]

[0812] Following the general procedure, compound 2e (0.43 g, 37% yield) was obtained as a white solid. ESI m/z: 445 (M+H)⁺.

### 2-[2-({[(9H-fluoren-9-yl)methoxy]carbonyl}amino)-N-methylacetamido]acetic acid (2f)

[chemical structure]

[0814] Following the general procedure, compound 2f (2.6 g, 72% yield) was obtained as a white solid. ESI m/z: 369 (M+H)⁺.

### 2-[2-({[(9H-fluoren-9-yl)methoxy]carbonyl}amino)-2-methylpropanamido]acetic acid (2g)

[chemical structure]

[0816] Following the general procedure, compound 2g (0.60 g, 50% yield) was obtained as a white solid. ESI m/z: 383 (M+H)⁺.

### 2-[(2R)-2-({[(9H-fluoren-9-yl)methoxy]carbonyl}amino)-3-phenylpropanamido]acetic acid (2h)

[chemical structure]

[0818] Following the general procedure, compound 2e (0.43 g, 37% yield) was obtained as a white solid. ESI m/z: 445 (M+H)⁺.

### General Procedures of Synthesis of Compounds 3a-h

[0819] To a 10 L reaction flask were added THF (0.25-0.30 M) and compound 2 (1.0 equiv.) at 25-30° C., and to the obtained suspension was added pyridine (2.0 equiv.) at 25-30° C. After the mixture was stirred and turned clear, cupric acetate (0 or 0.3 equiv.) was added into the solution. The reaction mixture was cooled to 0-5° C. and lead (IV) acetate (1.5 equiv.) was added into the reaction mixture at 0-5° C. The mixture was then stirred at 0-5° C. for an hour and was then allowed to warm to 25-30° C. The reaction mixture was stirred at 25-30° C. for 16 hours until most compound 2 was consumed, which was monitored by LCMS. The resulting mixture was filtered through a short silica gel plug and the silica gel was washed with ethyl acetate (2×). The combined filtrate was diluted with ethyl acetate and water. After neutralized carefully with sodium bicarbonate powder to pH 7, the mixture was separated and the organic layer was washed with brine, dried over anhydrous sodium sulfate and concentrated in vacuo to give brown crude product, which was dissolved into DCM (3 L). The mixture was filtered through short silica gel plug eluting with DCM (3×) until compound 3 was totally collected. The collected solution was concentrated. To the residue was added MTBE and a white solid was precipitated at 25-30° C., which was collected by filtration. The solid was dried with nitrogen blowing at 25-30° C. for more than 16 hours to give pure compound 3 as a white solid. Or the brown crude product was purified by reversed phase flash chromatography or prep-HPLC to give pure compound 3 as a white solid.

### [2-({[(9H-fluoren-9-yl)methoxy]carbonyl}amino)acetamido]methyl acetate (3a)

[chemical structure]

[0821] Following the general procedure (catalyzed with cupric acetate (0.3 equiv.)), compound 3a (1.3 kg, 60% yield) was obtained as a white solid. ESI m/z: 391 (M+Na)⁺. ¹H NMR (400 MHz, DMSO_{d6}) δ 8.96 (t, J=6.8 Hz, 1H), 7.90 (d, J=7.6 Hz, 2H), 7.72 (d, J=7.2 Hz, 2H), 7.59 (t, J=6.0 Hz, 1H), 7.43 (t, J=7.2 Hz, 2H), 7.34 (t, J=7.2 Hz, 2H), 5.10 (d, J=7.2 Hz, 2H), 4.36-4.19 (m, 3H), 3.66 (d, J=6.0 Hz, 2H), 2.00 (s, 3H) ppm.

### [(2S)-3-[(tert-butyldimethylsilyl)oxy]-2-({[(9H-fluoren-9-yl)methoxy]carbonyl}amino)propanamido]methyl acetate (3b)

[chemical structure]

[0823] Following the general procedure without cupric acetate, compound 3b (0.19 g, 45% yield) was obtained as a white solid after purification by prep-HPLC (0-100% acetonitrile in aq. formic acid (0.1%)). ESI m/z: 535 (M+Na)⁺.

### benzyl (4S)-4-{[(acetyloxy)methyl]carbamoyl}-4-({[(9H-fluoren-9-yl)methoxy]carbonyl}amino)butanoate (3c)

[chemical structure]

[0825] Following the general procedure without cupric acetate, compound 3c (0.20 g, 30% yield) was obtained as a white solid after purification by reversed phase flash chromatography (0-60% acetonitrile in aq. formic acid (0.1%)). ESI m/z: 553 (M+Na)⁺.

### [(2S)-6-azido-2-({[(9H-fluoren-9-yl)methoxy]carbonyl}amino)hexanamido]methyl acetate (3d)

[chemical structure]

[0827] Following the general procedure without cupric acetate, compound 3d (0.57 g, 84% yield) was obtained as a white solid after purification by prep-HPLC (0-100% acetonitrile in aq. formic acid (0.1%)). ESI m/z: 488 (M+Na)⁺.

### [(2S)-2-({[(9H-fluoren-9-yl)methoxy]carbonyl}amino)-3-phenylpropanamido]methyl acetate (3e)

[chemical structure]

[0829] Following the general procedure without cupric acetate, compound 3c (0.36 g, 81% yield) was obtained as a white solid after purification by prep-HPLC (0-100% acetonitrile in aq. formic acid (0.1%)). ESI m/z: 481 (M+Na)⁺. ¹H NMR (400 MHz, DMSO) δ 9.13 (t, J=6.9 Hz, 1H), 7.88 (d, J=7.5 Hz, 2H), 7.71 (d, J=8.7 Hz, 1H), 7.67-7.58 (m, 2H), 7.46-7.36 (m, 2H), 7.35-7.23 (m, 6H), 7.19 (t, J=7.1 Hz, 1H), 5.18-5.04 (m, 2H), 4.32-4.21 (m, 1H), 4.21-4.07 (m, 3H), 3.05-2.73 (m, 2H), 2.00 (s, 3H) ppm.

### [2-({[(9H-fluoren-9-yl)methoxy]carbonyl}amino)-N-methylacetamido]methyl acetate (3f)

[chemical structure]

[0831] Following the general procedure without cupric acetate, compound 3f (1.65 g, 60% yield) was obtained as a white solid. ESI m/z: 405 (M+Na)⁺.

### [2-({[(9H-fluoren-9-yl)methoxy]carbonyl}amino)-2-methylpropanamido]methyl acetate (3g)

[chemical structure]

[0833] Following the general procedure (catalyzed with cupric acetate (0.3 equiv.)), compound 3g (0.36 g, 81% yield) was obtained as a white solid after purification by prep-HPLC (0-100% acetonitrile in aq. formic acid (0.1%)). ESI m/z: 481 (M+Na)⁺.

### [(2R)-2-({[(9H-fluoren-9-yl)methoxy]carbonyl}amino)-3-phenylpropanamido]methyl acetate (3h)

[chemical structure]

[0835] Following the general procedure (catalyzed with cupric acetate (0.3 equiv.)) (0.34 g, 80% yield) was obtained as a white solid after purification by prep-HPLC (0-100% acetonitrile in aq. formic acid (0.1%)). ESI m/z: 481 (M+Na)⁺.

General procedures of synthesis of compounds 4a-h

[0836] To a reaction flask were added 1,2-dichloroethane (0.10-0.15 M), compound 3 (1.0 equiv.), glycolic acid (0.6 equiv.), and pyridium p-toluenesulfonate (PPTS) (0.2 equiv.) at room temperature. The reaction mixture was heated to 45-50° C. and stirred for an hour, and to the hot solution was added twice glycolic acid (0.6 equiv. 2×) once per hour. The mixture was then stirred at 45-50° C. for 16 hours, which was monitored by LCMS. After cooled to 25-30° C., the precipitates were filtered and collected. The solid was dissolved into aqueous sodium bicarbonate (3%) obtaining the mixture with pH 7-8 at 5-10° C., which was washed with mixed solvent ethyl acetate and THF (v/v=1, 3×). To the aqueous layer was added MTBE at 5-10° C. and acidified with sat aq. citric acid to pH 3-4 to precipitate large amount of solid. The mixture was filtered, and the cake was washed with water (1×) and MTBE (2×), dried under nitrogen blow at 25-30° C. over 48 hours to give wet compound 4 (75% yield) as a white solid, which containing 3% water according to HNMR. The product was dried again in vacuum over 48 hours to give dry compound 4 (73% yield) as a white solid. Or the reaction mixture was directly purified by reversed phase flash chromatography or prep-HPLC to give pure compound 4 as a white solid.

### 2-{[2-({[(9H-Fluoren-9-yl)methoxy]carbonyl}amino)acetamido]methoxy}acetic acid (4a)

[chemical structure]

[0838] Following the general procedure, compound 4a (0.96 g, 80% yield) was obtained as a white solid. >99% in HPLC, ESI m/z: 407 (M+Na)⁺. ¹H NMR (400 MHz, DMSO_{d6}) δ 12.53 (br s, 1H), 8.72 (t, J=6.8 Hz, 1H), 7.90 (d, J=7.2 Hz, 2H), 7.72 (d, J=7.6 Hz, 2H), 7.59 (t, J=6.4 Hz, 1H), 7.42 (d, J=7.6 Hz, 2H), 7.33 (d, J=7.2 Hz, 2H), 4.60 (d, J=6.8 Hz, 2H), 4.31-4.18 (m, 3H), 3.98 (s, 2H), 3.62 (d, J=6.0 Hz, 2H) ppm.

### 2-{[(2S)-3-[(tert-butyldimethylsilyl)oxy]-2-({[(9H-fluoren-9-yl)methoxy]carbonyl}amino)propanamido]methoxy}acetic acid (4b)

[chemical structure]

[0840] Following the general procedure, compound 4b (57 mg, 31% yield) was obtained as a yellow solid after purification by prep-HPLC (0-100% acetonitrile in aq. TFA (0.05%)). ESI m/z: 551 (M+Na)⁺.

### 2-{[(2S)-5-(benzyloxy)-2-({[(9H-fluoren-9-yl)methoxy]carbonyl}amino)-5-oxopentanamido]methoxy}acetic acid (4c)

[chemical structure]

[0842] Following the general procedure, compound 4c (0.13 g, 65% yield) was obtained as a white solid after purification by prep-HPLC (0-90% acetonitrile in aq. formic acid (0.1%)). ESI m/z: 569 (M+Na)⁺.

### 2-{[(2S)-6-azido-2-({[(9H-fluoren-9-yl)methoxy]carbonyl}amino)hexanamido]methoxy}acetic acid (4d)

[chemical structure]

[0844] Following the general procedure, compound 4d (0.30 g, 51% yield) was obtained as a white solid after purification by prep-HPLC (5-95% acetonitrile in aq. ammonium bicarbonate (10 mM)). ESI m/z: 504 (M+Na)⁺.

### 2-{[(2S)-2-({[(9H-fluoren-9-yl)methoxy]carbonyl}amino)-3-phenylpropanamido]methoxy}acetic acid (4e)

[chemical structure]

[0846] Following the general procedure, compound 4e (0.14 g, 38% yield) was obtained as a white solid after purification by reversed phase flash chromatography (0-25% acetonitrile in water). ESI m/z: 474 (M+Na)⁺.

### 2-{[2-({[(9H-fluoren-9-yl)methoxy]carbonyl}amino)-N-methylacetamido]methoxy}acetic acid (4f)

[chemical structure]

[0848] Following the general procedure, compound 4f (1.0 g, 50% yield) was obtained as a white solid after purification by reversed phase flash chromatography (0-100% acetonitrile in aq. TFA (0.01%)). ESI m/z: 421 (M+Na)⁺.

### 2-{[2-({[(9H-fluoren-9-yl)methoxy]carbonyl}amino)-2-methylpropanamido]methoxy}acetic acid (4g)

[chemical structure]

[0850] Following the general procedure, compound 4g (0.10 g, 40% yield) was obtained as a white solid after purification by reversed phase flash chromatography (0-100% acetonitrile in aq. TFA (0.01%)). ESI m/z: 435 (M+Na)⁺.

### 2-{[(2R)-2-({[(9H-fluoren-9-yl)methoxy]carbonyl}amino)-3-phenylpropanamido]methoxy}acetic acid (4h)

[chemical structure]

[0852] Following the general procedure, compound 4h (0.14 g, 38% yield) was obtained as a white solid after purification by reversed phase flash chromatography (0-100% acetonitrile in aq. TFA (0.01%)). ESI m/z: 474 (M+Na)⁺.

### Synthesis of 2-{[2-({[(9H-Fluoren-9-yl)methoxy]carbonyl}amino)acetamido]methoxy}acetic acid (4a)

[0853] The large scale synthesis of intermediate 4a is described in Scheme 8a.

### [2-({[(9H-Fluoren-9-yl)methoxy]carbonyl}amino)acetamido]methyl acetate (3a)

[0854] To a 10 L reaction flask were added THF (6.7 L) and Fmoc-Gly-Gly-OH (2a) (0.67 kg, 1.9 mol) at 25-30° C. To the obtained suspension was added pyridine (0.30 kg, 3.8 mol) at 25-30° C. After the mixture was stirred and turned clear, cupric acetate (0.10 kg, 0.57 mol) was added into the solution. The reaction mixture was cooled to 0-5° C. and lead(IV) acetate (1.7 kg, 2.8 mol) was added into the reaction mixture at 0-5° C. The mixture was then stirred at 0-5° C. for an hour and was then allowed to warm to 25-30° C. The reaction mixture was stirred at 25-30° C. for 16 hours until most of 2a was consumed, which was monitored by LCMS. The resulting mixture was filtered through a short silica gel plug (200 g) and the silica gel was washed with ethyl acetate (1 L×2). The combined filtrate was diluted with ethyl acetate (10 L) and water (10 L). After careful neutralization with sodium bicarbonate powder to pH 7, the mixture was separated and the organic layer was washed with brine (5 L×1), dried over anhydrous sodium sulfate, and concentrated in vacuo to give brown crude product, which was combined with the crude product from other two batches with similar LCMS (0.60 kg batch and 0.80 kg batch) and was dissolved into DCM (3 L). The mixture was filtered through short silica gel plug (0.30 kg) eluting with DCM (1 L×3) until compound 3a was totally collected. The collected solution was concentrated to 2 L. To the residue was added MTBE (3 L) and a white solid was precipitated at 25-30° C., which was collected by filtration. The solid was dried with nitrogen blowing at 25-30° C. for more than 16 hours to give pure compound 3a (1.3 kg, 60% yield) as a white solid. ESI m/z: 254 (M+H)⁺. ¹H NMR (400 MHz, DMSO_{d6}) δ 8.96 (t, J=6.8 Hz, 1H), 7.90 (d, J=7.6 Hz, 2H), 7.72 (d, J=7.2 Hz, 2H), 7.59 (t, J=6.0 Hz, 1H), 7.43 (t, J=7.2 Hz, 2H), 7.34 (t, J=7.2 Hz, 2H), 5.10 (d, J=7.2 Hz, 2H), 4.36-4.19 (m, 3H), 3.66 (d, J=6.0 Hz, 2H), 2.00 (s, 3H) ppm.

| | reactants | | reagents | | | | | | Solvent | Temp. | Time | | Product 3a | | |
|---|---|---|---|---|---|---|---|---|---|---|---|---|---|---|---|
| # | 2a | | Cu(OAc)₂ | | Pb(OAc)₄ | | Pyridine | | THF | (° C.) | (h) | purification | amount | Yield | purity |
| 1 | 0.67 | kg | 0.10 | kg, | 1.7 | kg | 0.30 | kg | 6.7 L | 0-5 | 1 | Filtration | 1.3 kg | 60% | 99% (LCMS) |
| | 1.9 | mol | 0.57 | mol | 2.8 | mol | 3.8 | mol | | 25-30 | 16 | through | | | 0.9 wt % MTBE |
| | | | (0.3 eq.) | | (1.5 eq.) | | (2.0 eq.) | | | | | silica gel | | | and 0.7 wt % |
| 2 | 0.60 | kg | 92 | g | 1.5 | kg | 0.27 | kg | 6 L | 0-5 | 1 | plug | | | DCM |
| | 1.7 | mol | 0.51 | mol | 3.4 | mol | 3.4 | mol | | 25-30 | 16 | | | | |
| | | | (0.3 eq.) | | (2.0 eq.) | | (2.0 eq.) | | | | | | | | |
| 3 | 0.80 | kg | 123 | g | 2.0 | kg | 0.36 | kg | 8 L | 0-5 | 1 | | | | |
| | 2.3 | mol | 0.68 | mol | 4.5 | mol | 4.6 | mol | | 25-30 | 16 | | | | |

| | | |
|---|---|---|
| (0.3 eq.) | (2.0 eq.) | (2.0 eq.) |

### 2-{[2-({[(9H-Fluoren-9-yl)methoxy]carbonyl}amino)acetamido]methoxy}acetic acid (4a)

[0855] To a 50 L jacked reaction flask were added 1,2-dichloroethane (19 L), compound 3a (0.96 kg, 2.6 mol), glycolic acid (0.12 kg, 1.6 mol), and pyridium p-toluenesulfonate (PPTS) (0.13 kg, 0.52 mol) successively at 20-25° C. The reaction mixture was stirred at 45-50° C. for an hour, and to the hot solution was added twice glycolic acid (0.12 kg, 1.6 mol) once per hour. The mixture was then stirred at 45-50° C. for 16 hours, which was monitored by LCMS. After cooled to 25-30° C., precipitates were filtered and collected, which were combined with other batches with similar LCMS (200 g, 1.25 kg). The combined solid was dissolved into aqueous sodium bicarbonate (0.44 kg in 15 L of water) providing the mixture with pH 7-8 at 5-10° C., which was washed with mixed solvent ethyl acetate and THF (v/v=1, 4.0 L×3). To the aqueous layer was added MTBE (5 L) at 5-10° C., and it was acidified with sat. aq. citric acid to pH 3-4 to precipitate large amount of solid. The mixture was filtered, and the cake was washed with water (1 L) and MTBE (1 L×2), dried under nitrogen blow at 25-30° C. over 48 hours to give compound 4a (1.1 kg, 75% yield) as a white solid (contains 3% of water according to HNMR). The product was dried again in vacuum over 48 hours to give dry compound 4a (0.96 kg, 97% recycled yield from wet product) as a white solid. >99% in HPLC, ESI m/z: 407 (M+Na)⁺. ¹H NMR (400 MHz, DMSO_{d6}) δ 12.53 (br s, 1H), 8.72 (t, J=6.8 Hz, 1H), 7.90 (d, J=7.2 Hz, 2H), 7.72 (d, J=7.6 Hz, 2H), 7.59 (t, J=6.4 Hz, 1H), 7.42 (d, J=7.6 Hz, 2H), 7.33 (d, J=7.2 Hz, 2H), 4.60 (d, J=6.8 Hz, 2H), 4.31-4.18 (m, 3H), 3.98 (s, 2H), 3.62 (d, J=6.0 Hz, 2H) ppm.

[0856] The product contained around 0.96% of unknown contaminate with M/Z=617 (positive mode). This side-product can be removed in the next step. The product C should be dried thoroughly as water will decrease the yield in the next step.

| | Reactants | | | reagents | | Solvent | Temp. | Time | | Product 4a | | |
|---|---|---|---|---|---|---|---|---|---|---|---|---|
| # | 3a | Glycolic acid | | PPTS | | DCE | (° C.) | (h) | purification | amount | Yield | purity |
| 1 | 0.20 kg | 0.074 | kg | 0.027 | kg | 4.0 L | 45-50 | 18 | Wash and | 0.96 kg | 75% | 99% |
| | 0.54 mol | 0.97 | mol | 0.11 | mol | | | | precipitated | | | (HPLC) |
| | | 1.8 | eq. | 0.20 | eq. | | | | | | | 0.5 wt % |
| 2 | 0.25 kg | 0.093 | kg | 0.034 | kg | 5.0 L | 45-50 | 18 | | | | ethyl |
| | 0.68 mol | 1.2 | mol | 0.14 | mol | | | | | | | acetate |
| | | 1.8 | eq. | (0.20 eq.) | | | | | | | | and |
| 3 | 0.96 kg | 0.12 kg × 3 | | 0.13 | kg | 19 L | 45-50 | 18 | | | | 0.6 wt % MTBE |
| | 2.6 mol | 4.7 | mol | 0.52 | mol | | | | | | | |
| | | 1.8 | eq. | 0.20 | eq. | | | | | | | |

General procedures of synthesis of compounds 5a-h

[0857] To a solution of compound 4 (1.1 equiv.) in DMF (5-8 mL per gram of 4) were added HATU (1.1 equiv.) and DIPEA (1.0 equiv.), and the reaction mixture was stirred at room temperature for 15 minutes. To the stirred solution was then added a mixture of Exatecan mesylate (1.0 equiv.) and DIPEA (2.0 equiv.) in DMF (10 mL per gram of Exatecan). The reaction mixture was stirred at room temperature for 4 hours, which was monitored by LCMS. The resulting mixture was diluted with ethyl acetate and washed with brine (2×). The organic layer was dried over anhydrous sodium sulfate, filtered, and concentrated in vacuo. The residue was co-evaporated with ethyl acetate (4×) in vacuo to provide crude product 5, which was added ethyl acetate. The suspension was refluxed for around 20 minutes until it turned clear and was then cooled to 25° C. naturally and stood for half an hour. The white precipitates were collected by filtration, washed with ethyl acetate (2×) and dried in vacuum to give 5 as a white solid. Or the crude product 5 was purified by reversed phase flash chromatography to give pure compound 5 as a solid.

### (9H-fluoren-9-yl)methyl N-({[({[(10S,23S)-10-ethyl-18-fluoro-10-hydroxy-19-methyl-5,9-dioxo-8-oxa-4,15-diazahexacyclo[14.7.1.0²,4.0^{4,13}.0^{6,11}.0^{20,24}]tetracosa-1,6(11),12,14,16,18,20(24)-heptaen-23-yl]carbamoyl}methoxy)methyl]carbamoyl}methyl)carbamate (5a)

[chemical structure]

[0859] Following the general procedure, compound 5a (2.6 g, 87% yield) was obtained as a white solid ESI m/z: 802.3 (M+H)⁺. 95.2% in HPLC.

### (9H-fluoren-9-yl)methyl N-[(1S)-2-[(tert-butyldimethylsilyl)oxy]-1-{[({[(10S,23S)-10-ethyl-18-fluoro-10-hydroxy-19-methyl-5,9-dioxo-8-oxa-4,15-diazahexacyclo[14.7.1.0^{2,14}.0^{4,13}.0^{6,11}.0^{20,24}]tetracosa-1,6(11),12,14,16,18,20(24)-heptaen-23-yl]carbamoyl}methoxy)methyl]carbamoyl}ethyl]carbamate (5b)

[chemical structure]

[0861] Following the general procedure, compound 5b (0.12 g, 53% yield) was obtained as a white solid after purification by reversed phase flash chromatography (0-100% acetonitrile in aq. TFA (0.05%)). ESI m/z: 946 (M+H)⁺.

### benzyl (4S)-4-{[({[(10S,23S)-10-ethyl-18-fluoro-10-hydroxy-19-methyl-5,9-dioxo-8-oxa-4,15-diazahexacyclo[14.7.1.0^{2,14}.0^{4,13}.0^{6,11}.0^{20,24}]tetracosa-1,6(11),12,14,16,18,20(24)-heptaen-23-yl]carbamoyl}methoxy)methyl]carbamoyl}-4-({[(9H-fluoren-9-yl)methoxy]carbonyl}amino)butanoate (5c)

[chemical structure]

[0863] Following the general procedure, compound 5c (0.21 g, 74% yield) was obtained as a yellow solid after purification by reversed phase flash chromatography (0-70% acetonitrile in aq. formic acid (0.1%)). ESI m/z: 964 (M+H)⁺.

### (4S)-4-{[({[(10S,23S)-10-ethyl-18-fluoro-10-hydroxy-19-methyl-5,9-dioxo-8-oxa-4,15-diazahexacyclo[14.7.1.0^{2,14}.0^{4,13}.0^{6,11}.0^{20,24}]tetracosa-1,6(11),12,14,16,18,20(24)-heptaen-23-yl]carbamoyl}methoxy)methyl]carbamoyl}-4-({[(9H-fluoren-9-yl)methoxy]carbonyl}amino)butanoic acid (5ca)

[chemical structure]

[0865] To a stirred solution of compound 5a (0.21 g, 0.22 mmol) in methanol (20 mL) was added palladium on carbon (36 mg, containing 10% palladium) under protection of nitrogen. The reaction mixture was stirred at room temperature under hydrogen atmosphere for 4 hours, which was monitored by LCMS. The mixture was filtered through Celite and the filtrate was concentrated in vacuo to give crude compound 5ca (0.10 g, 53% yield) as a yellow solid, which was used for the next step without further purification. ESI m/z: 874 (M+H)⁺.

### (9H-fluoren-9-yl)methyl N-[(1S)-3-carbamoyl-1-{[({[(10S,23S)-10-ethyl-18-fluoro-10-hydroxy-19-methyl-5,9-dioxo-8-oxa-4,15-diazahexacyclo[14.7.1.0²,4.0^{4,13}.0^{6,11}.0^{20,24}]tetracosa-1,6(11),12,14,16,18,20(24)-heptaen-23-yl]carbamoyl}methoxy)methyl]carbamoyl}propyl]carbamate (5cb)

[chemical structure]

[0867] To a solution of compound 5ca (50 mg, 57 μmol) in DMF (1 mL) were added ammonium chloride (3.0 mg, 57 μmol), HATU (32 mg, 85 μmol) and DIPEA (22 mg, 0.17 mmol), and the reaction mixture was stirred at room temperature for 3 hours, which was monitored by LCMS. The resulting mixture was directly purified by reversed phase flash chromatography (0-100% acetonitrile in aq. formic acid (0.1%)) to give compound 5cb (40 mg, 81% yield) as a white solid. ESI m/z: 873 (M+H)⁺.

### (9H-fluoren-9-yl)methyl N-[(1S)-5-azido-1-{[({[(10S,23S)-10-ethyl-18-fluoro-10-hydroxy-19-methyl-5,9-dioxo-8-oxa-4,15-diazahexacyclo[14.7.1.0^{2,14}.0^{4,13}.0^{6,11}.0^{20,24}]tetracosa-1,6(11),12,14,16,18,20(24)-heptaen-23-yl]carbamoyl}methoxy)methyl]carbamoyl}pentyl]carbamate (5d)

[chemical structure]

[0869] Following the general procedure, compound 5d (85 mg, 91% yield) was obtained as a white solid after purification by prep-HPLC (5-95% acetonitrile in aq. TFA (0.1%)). ESI m/z: 900 (M+H)⁺.

### (9H-fluoren-9-yl)methyl N-[(1S)-5-amino-1-{[({[(10S,23S)-10-ethyl-18-fluoro-10-hydroxy-19-methyl-5,9-dioxo-8-oxa-4,15-diazahexacyclo[14.7.1.0^{2,14}.0^{4,13}.0^{6,11}.0^{20,24}]tetracosa-1,6(11),12,14,16,18,20(24)-heptaen-23-yl]carbamoyl}methoxy)methyl]carbamoyl}pentyl]carbamate (5da)

[chemical structure]

[0871] To a stirred solution of compound 5d (45 mg, 50 μmol) in methanol (20 mL) was added palladium on carbon (10 mg, containing 10% palladium) under protection of nitrogen. The reaction mixture was stirred at room temperature under hydrogen atmosphere for 2 hours, which was monitored by LCMS. The mixture was filtered through Celite and the filtrate was concentrated in vacuo and the residue was purified by prep-HPLC (5-95% acetonitrile in aq. TFA (0.03%)) to give compound 5da (38 mg, 86% yield) as a yellow solid. ESI m/z: 873 (M+H)⁺.

### (9H-fluoren-9-yl)methyl N-[(1S)-1-{[({[(10S,23S)-10-ethyl-18-fluoro-10-hydroxy-19-methyl-5,9-dioxo-8-oxa-4,15-diazahexacyclo[14.7.1.0^{2,14}.0^{4,13}.0^{6,11}.0^{20,24}]tetracosa-1,6(11),12,14,16,18,20(24)-heptaen-23-yl]carbamoyl}methoxy)methyl]carbamoyl}-2-phenylethyl]carbamate (5e)

[chemical structure]

[0873] Following the general procedure, compound 5e (24 mg, 64% yield) was obtained as a white solid after purification by prep-HPLC (5-95% acetonitrile in aq. TFA (0.1%)). ESI m/z: 892 (M+H)⁺.

### (9H-fluoren-9-yl)methyl N-({[({[(10S,23S)-10-ethyl-18-fluoro-10-hydroxy-19-methyl-5,9-dioxo-8-oxa-4,15-diazahexacyclo[14.7.1.0²,4.0^{4,13}.0^{6,11}.0^{20,24}]tetracosa-1,6(11),12,14,16,18,20(24)-heptaen-23-yl]carbamoyl}methoxy)methyl](methyl)carbamoyl}methyl)carbamate (5f)

[chemical structure]

[0875] Following the general procedure, compound 5f (50 mg, 61% yield) was obtained as a white solid after purification by prep-HPLC (5-95% acetonitrile in aq. TFA (0.01%)). ESI m/z: 816 (M+H)⁺.

### (9H-fluoren-9-yl)methyl N-(1-{[({[(10S,23S)-10-ethyl-18-fluoro-10-hydroxy-19-methyl-5,9-dioxo-8-oxa-4,15-diazahexacyclo[14.7.1.0^{2,14}.0^{4,13}.0^{6,11}.0^{20,24}]tetracosa-1,6(11),12,14,16,18,20(24)-heptaen-23-yl]carbamoyl}methoxy)methyl]carbamoyl}-1-methylethyl)carbamate (5g)

[chemical structure]

[0877] Following the general procedure, compound 5g (0.17 g, 61% yield) was obtained as a white solid after purification by reversed phase flash chromatography (0-70% acetonitrile in aq. TFA (0.01%)). ESI m/z: 830 (M+H)⁺.

### (9H-fluoren-9-yl)methyl N-[(1R)-1-{[({[(10S,23S)-10-ethyl-18-fluoro-10-hydroxy-19-methyl-5,9-dioxo-8-oxa-4,15-diazahexacyclo[14.7.1.0²,4.0^{4,13}.0^{6,11}.0^{20,24}]tetracosa-1,6(11),12,14,16,18,20(24)-heptaen-23-yl]carbamoyl}methoxy)methyl]carbamoyl}-2-phenylethyl]carbamate (5h)

[chemical structure]

[0879] Following the general procedure, compound 5h (92 mg, 73% yield) was obtained as a yellow solid after purification by prep-HPLC (5-95% acetonitrile in aq. TFA (0.1%)). ESI m/z: 892 (M+H)⁺.

### Payloads (ProDXds)

### General Procedure of De-Fmoc to Obtain Payloads (ProDXds)

[0880] To a solution of compound 5 (1.0 equiv.) in THF (20 mL per gram of 5) was added diethylamine (2 mL per gram of 5), and the reaction mixture was stirred at room temperature for 2-48 hours until Fmoc was totally removed according to LCMS. The volatiles were removed thoroughly in vacuo and the residue was diluted with water (5 mL). The aqueous mixture was adjusted to pH 2 with the addition of aq. TFA (10%) and was washed with MTBE (20 mL×2). The aqueous layer was then stirred at room temperature for 16 hours until the ring-open form turned to lactone form, which was monitored by LCMS. The resulting aqueous mixture was lyophilized to give crude payloads, which was purified by reversed phase flash chromatography (0-100% acetonitrile in aq. TFA (0.03%)) to give pure payloads (TFA salt) as a solid or prep-HPLC (5-95% acetonitrile in aq. formic acid (0.1%)) to give pure payloads (free base) as a solid.

### P1

### 2-Amino-N-[({[(10S,23S)-10-ethyl-18-fluoro-10-hydroxy-19-methyl-5,9-dioxo-8-oxa-4,15-diazahexacyclo[14.7.1.0^{2,14}.0^{4,13}.0^{6,11}.0^{20,24}]tetracosa-1,6(11),12,14,16,18,20(24)-heptaen-23-yl]carbamoyl}methoxy)methyl]acetamide (P1)

[chemical structure]

[0882] Following the general procedure, P1 (1.4 g, 77% yield) was obtained as a light-yellow solid. ESI m/z: 580.3 (M+H)⁺. ¹H NMR (400 MHz, DMSO_{d6}) δ 9.20 (t, J=6.4 Hz, 1H), 8.59 (d, J=9.2 Hz, 1H), 8.07 (br s, 3H), 7.80 (d, J=11.2 Hz, 1H), 7.33 (s, 1H), 6.57 (s, 1H), 5.64-5.57 (m, 1H), 5.43 (s, 2H), 5.30-5.09 (m, 2H), 4.77-4.69 (m, 2H), 4.07 (s, 2H), 3.67 (s, 2H), 3.28-3.09 (m, 2H), 2.40 (s, 3H), 2.26-2.12 (m, 2H), 1.93-1.80 (m, 2H), 0.88 (t, J=7.2 Hz, 3H) ppm. ¹⁹F NMR (376 MHz, DMSO_{d6}) δ −73 (TFA), −111 (Ar-F) ppm.

### P2

### (2S)-2-amino-N-[({[(10S,23S)-10-ethyl-18-fluoro-10-hydroxy-19-methyl-5,9-dioxo-8-oxa-4,15-diazahexacyclo[14.7.1.0^{2,14}.0^{4,13}.0^{6,11}.0^{20,24}]tetracosa-1,6(11),12,14,16,18,20(24)-heptaen-23-yl]carbamoyl}methoxy)methyl]-3-hydroxypropanamide (P2)

[chemical structure]

[0884] To a solution of compound 5b (0.12 g, 0.12 mmol) in DMF (1 mL) was added diethylamine (0.1 mL), and the mixture was stirred at room temperature for 2 hours until Fmoc was totally removed, which was monitored by LCMS. The resulting mixture was directly purified by reserved phase flash chromatography (0-100% acetonitrile in aq. TFA (0.05%)) to give de-Fmoc-product (68 mg, ESI m/z: 724 (M+H)⁺) as a yellow solid, which was dissolved in DMF (1 mL). To the solution was added cesium fluoride (31 mg, 0.20 mmol) at 0° C. The mixture was stirred at room temperature for an hour, which was monitored by LCMS. The mixture was separated by reversed phase flash chromatography (0-100% acetonitrile in aq. TFA (0.05%)) to give P2 (17 mg, 22% yield) as a white solid. ESI m/z: 610 (M+H)⁺. ¹H NMR (400 MHz, DMSO_{d6}) δ 9.26 (t, J=6.4 Hz, 1H), 8.58 (d, J=8.8 Hz, 1H), 8.14 (s, 2H), 7.79 (d, J=10.8 Hz, 1H), 7.33 (s, 1H), 6.56 (s, 1H), 5.60-5.53 (m, 2H), 5.42 (s, 2H), 5.20-5.18 (m, 2H), 4.80-4.76 (m, 1H), 4.67-4.63 (m, 1H), 4.05 (s, 2H), 3.90-3.89 (m, 1H), 3.77-3.76 (m, 2H), 3.27-3.14 (m, 2H), 2.39 (s, 3H), 2.17-2.16 (m, 2H), 1.90-1.83 (m, 2H), 0.87 (t, J=6.8 Hz, 3H) ppm. ¹⁹F NMR (376 MHz, DMSO_{d6}) δ −74 (TFA), −111 (Ar-F) ppm.

### P3

### (2S)-2-amino-N-[({[(10S,23S)-10-ethyl-18-fluoro-10-hydroxy-19-methyl-5,9-dioxo-8-oxa-4,15-diazahexacyclo[14.7.1.0^{2,14}.0^{4,13}.0^{6,11}.0^{20,24}]tetracosa-1,6(11),12,14,16,18,20(24)-heptaen-23-yl]carbamoyl}methoxy)methyl]pentanediamide (P3)

[chemical structure]

[0886] Following the general procedure, P3 (20 mg, 49% yield) was obtained as a light-yellow solid. ESI m/z: 651 (M+H)⁺. ¹H NMR (400 MHz, DMSO_{d6}) δ 8.95-8.80 (m, 1H), 8.80 (d, J=8.4 Hz, 1H), 8.18 (s, 1H), 7.81 (d, J=11.2 Hz, 1H), 7.31 (s, 1H), 7.29-7.20 (m, 1H), 6.73 (s, 1H), 6.52 (s, 1H), 5.65-5.56 (m, 1H), 5.42 (s, 2H), 5.21 (s, 2H), 4.63 (br s, 2H), 4.01 (s, 1H), 3.25-3.13 (m, 2H), 3.06-2.90 (m, 2H), 2.40 (s, 3H), 2.25-2.05 (m, 4H), 1.93-1.74 (m, 3H), 1.64-1.50 (m, 1H), 0.87 (t, J=6.8 Hz, 1H) ppm. ¹⁹F NMR (376 MHz, DMSO_{d6}) δ −111 (Ar-F) ppm.

### P4

### (4S)-4-amino-4-{[({[(10S,23S)-10-ethyl-18-fluoro-10-hydroxy-19-methyl-5,9-dioxo-8-oxa-4,15-diazahexacyclo[14.7.1.0^{2,14}.0^{4,13}.0^{6,11}.0^{20,24}]tetracosa-1,6(11),12,14,16,18,20(24)-heptaen-23-yl]carbamoyl}methoxy)methyl]carbamoyl}butanoic acid (P4)

[chemical structure]

[0888] Following the general procedure, P4 (20 mg, 49% yield) was obtained as a light-yellow solid. ESI m/z: 652 (M+H)⁺. ¹H NMR (400 MHz, DMSO_{d6}) δ 8.95-8.82 (m, 1H), 8.55 (d, J=9.2 Hz, 1H), 8.30 (s, 1H), 7.79 (d, J=11.2 Hz, 1H), 7.31 (s, 1H), 5.65-5.56 (m, 1H), 5.42 (s, 2H), 5.21 (s, 2H), 4.62 (br s, 2H), 4.00 (s, 2H), 3.25-3.10 (m, 4H), 3.06-2.90 (m, 2H), 2.32 (s, 3H), 2.27-2.12 (m, 4H), 1.92-1.71 (m, 3H), 1.60-1.50 (m, 1H), 0.87 (t, J=7.2 Hz, 3H) ppm. ¹⁹F NMR (376 MHz, DMSO_{d6}) δ −111 (Ar-F) ppm.

### P5

### (2S)-2,6-diamino-N-[({[(10S,23S)-10-ethyl-18-fluoro-10-hydroxy-19-methyl-5,9-dioxo-8-oxa-4,15-diazahexacyclo[14.7.1.0^{2,14}.0^{4,13}.0^{6,11}.0^{20,24}]tetracosa-1,6(11),12,14,16,18,20(24)-heptaen-23-yl]carbamoyl}methoxy)methyl]hexanamide (P5)

[chemical structure]

[0890] Following the general procedure, P5 (13 mg, 43% yield) was obtained as a white solid. ESI m/z: 651 (M+H)⁺. ¹H NMR (400 MHz, DMSO_{d6}) δ 9.33 (t, J=6.5 Hz, 1H), 8.61 (d, J=8.8 Hz, 1H), 8.18 (s, 3H), 7.81 (d, J=10.9 Hz, 1H), 7.72 (s, 2H), 7.34 (s, 1H), 6.57 (s, 1H), 5.63-5.57 (m, 1H), 5.43 (s, 2H), 5.26-5.15 (m, 2H), 4.79-4.67 (m, 2H), 4.11-4.01 (m, 2H), 3.86-3.80 (m, 1H), 3.25-3.10 (m, 2H), 2.81-2.72 (m, 2H), 2.40 (s, 3H), 2.22-2.13 (m, 2H), 1.92-1.83 (m, 2H), 1.80-1.71 (m, 2H), 1.60-1.50 (m, 2H), 1.40-1.31 (m, 2H), 0.88 (t, J=7.3 Hz, 3H) ppm. ¹⁹F NMR (376 MHz, DMSO_{d6}) δ −74 (TFA), −111 (Ar-F) ppm.

### P6

### (2S)-2-amino-6-azido-N-[({[(10S,23S)-10-ethyl-18-fluoro-10-hydroxy-19-methyl-5,9-dioxo-8-oxa-4,15-diazahexacyclo[14.7.1.0^{2,14}.0^{4,13}.0^{6,11}.0^{20,24}]tetracosa-1,6(11),12,14,16,18,20(24)-heptaen-23-yl]carbamoyl}methoxy)methyl]hexanamide (P6)

[chemical structure]

[0892] Following the general procedure, P6 (27 mg, 89% yield) was obtained as a white solid. ESI m/z: 677 (M+H)⁺. ¹H NMR (400 MHz, DMSO_{d6}) δ 8.92-8.78 (m, 1H), 8.57 (d, J=8.8 Hz, 1H), 8.23 (s, 1H), 7.77 (d, J=10.9 Hz, 1H), 7.30 (s, 1H), 6.54 (s, 1H), 5.66-5.54 (m, 1H), 5.41 (s, 2H), 5.19 (s, 2H), 4.60 (d, J=1.8 Hz, 2H), 4.00 (s, 2H), 3.26 (t, J=6.8 Hz, 3H), 3.21-3.11 (m, 3H), 2.38 (s, 3H), 2.24-2.12 (m, 2H), 1.92-1.80 (m, 2H), 1.54-1.41 (m, 3H), 1.36-1.24 (m, 3H), 0.87 (t, J=7.3 Hz, 3H) ppm. ¹⁹F NMR (376 MHz, DMSO_{d6}) 6-111 (Ar-F) ppm.

### P7

### (2S)-2-amino-N-[({[(10S,23S)-10-ethyl-18-fluoro-10-hydroxy-19-methyl-5,9-dioxo-8-oxa-4,15-diazahexacyclo[14.7.1.0^{2,14}.0^{4,13}.0^{6,11}.0^{20,24}]tetracosa-1,6(11),12,14,16,18,20(24)-heptaen-23-yl]carbamoyl}methoxy)methyl]-3-phenylpropanamide (P7)

[chemical structure]

[0894] Following the general procedure, P7 (15 mg, 62% yield) was obtained as a white solid. ESI m/z: 670 (M+H)⁺. ¹H NMR (400 MHz, DMSO_{d6}) δ 8.86-8.77 (m, 1H), 8.56 (d, J=8.8 Hz, 1H), 8.29 (s, 1H), 7.78 (d, J=11.0 Hz, 1H), 7.29 (s, 1H), 7.21 (t, J=7.2 Hz, 2H), 7.12 (t, J=8.5 Hz, 3H), 6.52 (s, 1H), 5.64-5.56 (m, 1H), 5.45-5.34 (m, 2H), 5.25-5.12 (m, 2H), 4.58 (s, 2H), 3.96 (s, 2H), 3.25-3.08 (m, 4H), 2.85-2.70 (m, 1H), 2.39 (s, 3H), 2.28-2.08 (m, 3H), 1.87-1.76 (m, 2H), 0.84 (t, J=7.2 Hz, 3H) ppm. ¹⁹F NMR (376 MHz, DMSO_{d6}) 6-111 (Ar-F) ppm.

### P9

### 2-amino-N-[({[(10S,23S)-10-ethyl-18-fluoro-10-hydroxy-19-methyl-5,9-dioxo-8-oxa-4,15-diazahexacyclo[14.7.1.0^{2,14}.0^{4,13}.0^{6,11}.0^{20,24}]tetracosa-1,6(11),12,14,16,18,20(24)-heptaen-23-yl]carbamoyl}methoxy)methyl]-N-methylacetamide (P9)

[chemical structure]

[0896] Following the general procedure, P9 (22 mg, 60% yield) was obtained as a white solid. ESI m/z: 594 (M+H)⁺. ¹H NMR (400 MHz, DMSO_{d6}) δ 8.70 (d, J=8.9 Hz, 0.5H), 8.61 (d, J=8.9 Hz, 0.5H), 8.07 (s, 2H), 7.82-7.78 (m, 1H), 7.33 (d, J=1.8 Hz, 1H), 6.55 (d, J=2.4 Hz, 1H), 5.67-5.53 (m, 1H), 5.43 (s, 2H), 5.29-5.10 (m, 2H), 4.96-4.87 (m, 2H), 4.20-3.90 (m, 4H), 3.19 (d, J=6.6 Hz, 2H), 3.02 (s, 1.5H), 2.99 (s, 1.5H), 2.40 (s, 3H), 2.19-2.17 (m, 2H), 1.93-1.81 (m, 2H), 0.88 (t, J=7.2 Hz, 3H) ppm. ¹⁹F NMR (376 MHz, DMSO_{d6}) δ −73 (TFA), −111 (Ar-F) ppm.

### P11

### 2-amino-N-[({[(10S,23S)-10-ethyl-18-fluoro-10-hydroxy-19-methyl-5,9-dioxo-8-oxa-4,15-diazahexacyclo[14.7.1.0^{2,14}.0^{4,13}.0^{6,11}.0^{20,24}]tetracosa-1,6(11),12,14,16,18,20(24)-heptaen-23-yl]carbamoyl}methoxy)methyl]-2-methylpropanamide (P11)

[chemical structure]

[0898] Following the general procedure, P11 (15 mg, 62% yield) was obtained as a white solid. ESI m/z: 608 (M+H)⁺. ¹H NMR (400 MHz, DMSO_{d6}) δ 9.17-9.14 (m, 1H), 8.56 (d, J=8.0 Hz, 1H), 8.17 (s, 2H), 7.80 (d, J=8.0 Hz, 1H), 7.33 (s, 1H), 6.56 (s, 1H), 5.63-5.68 (m, 1H), 5.42 (s, 2H), 5.21 (s, 2H), 4.73 (d, J=4.0 Hz, 2H), 4.04 (s, 2H), 3.24-3.13 (m, 2H), 2.40 (s, 3H), 2.18 (d, J=4.0 Hz, 2H), 1.89-1.83 (m, 2H), 1.475 (s, 3H), 1.473 (s, 3H), 0.89-0.86 (m, 3H) ppm. ¹⁹F NMR (376 MHz, DMSO_{d6}) δ −73 (TFA), −111 (Ar-F) ppm.

### P12

### (2R)-2-amino-N-[({[(10S,23S)-10-ethyl-18-fluoro-10-hydroxy-19-methyl-5,9-dioxo-8-oxa-4,15-diazahexacyclo[14.7.1.0^{2,14}.0^{4,13}.0^{6,11}.0^{20,24}]tetracosa-1,6(11),12,14,16,18,20(24)-heptaen-23-yl]carbamoyl}methoxy)methyl]-3-phenylpropanamide (P12)

[chemical structure]

[0900] Following the general procedure, P12 (36 mg, 52% yield, TFA salt) was obtained as a white solid. ESI m/z: 670 (M+H)⁺. ¹H NMR (400 MHz, DMSO_{d6}) δ 9.29-9.26 (m, 1H), 8.55 (d, J=8.0 Hz, 1H), 8.19 (s, 3H), 7.80 (d, J=12 Hz, 1H), 7.33-7.23 (m, 6H), 6.55 (s, 1H), 5.62-5.57 (m, 1H), 5.45-5.35 (m, 2H), 5.20 (s, 2H), 4.69 (d, J=8.0 Hz, 1H), 4.07-3.96 (m, 3H), 3.11-2.96 (m, 3H), 2.40 (s, 3H), 2.21-2.16 (m, 2H), 1.92-1.82 (m, 2H), 1.27-1.23 (m, 1H), 0.88 (t, J=8.0 Hz, 3H) ppm. ¹⁹F NMR (376 MHz, DMSO_{d6}) δ −73 (TFA), −111 (Ar-F) ppm.

### (9H-fluoren-9-yl)methyl N-({[({[(10S,23S)-10-ethyl-18-fluoro-10-hydroxy-19-methyl-5,9-dioxo-8-oxa-4,15-diazahexacyclo[14.7.1.0^{2,14}.0^{4,13}.0^{6,11}.0^{20,24}]tetracosa-1,6(11),12,14,16,18,20(24)-heptaen-23-yl]carbamoyl}methoxy)methyl]carbamoyl}methyl)carbamate (Fmoc-ProDXd) (5a)

[chemical structure]

Exatecan is commercially available.

[0902] To a yellow solution of intermediate 4a (9.55 g, 24.86 mmol) in dry DMF (60 mL) were added HATU (9.45 g, 24.86 mmol) and DIPEA (2.91 g, 22.6 mmol), and the mixture was stirred at 25° C. for 15 minutes. To the reaction mixture was then added a mixed solution of Exatecan mesylate (12.0 g, 22.6 mmol) and DIPEA (5.82 g, 45.2 mmol) in dry DMF (60 mL). The reaction solution was stirred at 25° C. for 4 hours until Exatecan mesylate was consumed, which was monitored by LCMS. The resulting solution was diluted with ethyl acetate (0.90 L) and washed with brine (180 mL×2). The organic phase was dried over anhydrous sodium sulfate and concentrated in vacuo. The residue was co-evaporated with ethyl acetate (180 mL×4) in vacuo and the residue (50 g) was dissolved in ethyl acetate (400 mL). The suspension was refluxed for 20 minutes until it turned clear. And the solution was stood and white solid precipitated. The suspension was refluxed for an hour again and it was then cooled to 25° C. naturally and stood for half an hour. The white precipitates were collected by filtration and dried in vacuo to give compound Fmoc-proDxd (5a)(14.2 g, 78.3% yield, >99% purity) as a white solid. The filtrate was concentrated and purified by C18 column to provide (1.6 g, 8.8% yield, 97% purity). ESI m/z: 802.2 (M+H)⁺. ¹HNMR (400 MHz, DMSO_{d6}): δ 8.79 (t, J=6.4 Hz, 1H), 8.50 (d, J=9.6 Hz, 1H), 7.88 (d, J=7.6 Hz, 2H), 7.77 (d, J=10.8 Hz, 1H), 7.68 (d, J=7.2 Hz, 2H), 7.56 (t, J=6.0 Hz, 1H), 7.39 (t, J=7.6 Hz, 2H), 7.34 (s, 1H), 7.34-7.27 (m, 2H), 6.62-6.45 (m, 1H), 5.66-5.34 (m, 3H), 5.25-5.16 (m, 2H), 4.70-4.57 (m, 2H), 4.30-4.12 (m, 3H), 4.01 (s, 2H), 3.74-3.54 (m, 2H), 3.25-3.05 (m, 2H), 2.37 (s, 3H), 2.24-2.13 (m, 2H), 1.92-1.80 (m, 2H), 0.84 (t, J=7.6 Hz, 3H) ppm. ¹⁹FNMR (376 MHz, DMSO_{d6}) δ −111.33 ppm.

| | Raw material (Equivalent/Volume) | | | | | | | | | | | | | | | |
|---|---|---|---|---|---|---|---|---|---|---|---|---|---|---|---|---|
| | Exatecan | | Cpd C | | HATU | | DIPEA | | | Condition | | Purification | | | | |
| En- | mesylate | | (1.1 | | (1.1 | | (3.0 | | | Temp | Time | C18 column | Product | | | |
| try | (1.0 eq.) | | equiv.) | | equiv.) | | equiv.) | | DMF | (° C.) | (hr) | purification | Amount | Purity | Yield | Property |
| 1 | 1.0 | g | 0.80 | g | 0.79 | g | 0.73 | g | 15 ml | 25 | 16 | C18 column | 1.4 g | 97% | 93% | white |
| | | | | | | | | | | | | purification | | | | solid |
| 2 | 2.0 | g | 1.6 | g | 1.6 | g | 1.5 | g | 30 ml | 25 | 16 | C18 column | 2.6 g | 99% | 87% | white |
| | | | | | | | | | | | | purification | | | | solid |
| 3 | 2.0 | g | 1.6 | g | 1.6 | g | 1.5 | g | 30 ml | 25 | 16 | C18 column | 2.7 g | 97% | 90% | white |
| | | | | | | | | | | | | purification | | | | solid |
| 4 | 12 | g | 9.55 | g | 9.45 | g | 8.74 | g | 180 mL | 25 | 4 | Precipitation | 14.2 g | >99% | 78.3% | white |
| | 22.6 | mmol | 24.86 | mmol | 24.86 | mmol | 67.8 | mmol | | | | Mother | 1.6 | 97% | 8.8% | solid |

solution
purified
by C18
column

### Example 6. Exemplary Synthesis of ProDXds from DXd (Scheme 2B)

[0903] P1 (CP1190) synthesized from DXd

### 2-Amino-N-[({[(10S,23S)-10-ethyl-18-fluoro-10-hydroxy-19-methyl-5,9-dioxo-8-oxa-4,15-diazahexacyclo[14.7.1.0^{2,14}.0^{4,13}.0^{6,11}.0^{20,24}]tetracosa-1,6(11),12,14,16,18,20(24)-heptaen-23-yl]carbamoyl}methoxy)methyl]acetamide (P1)

[chemical structure]

[0905] To a solution of DXd (62 mg, 0.13 mmol) in THF (HPLC grade, 5 mL) were added compound 3a (0.23 g, 0.63 mmol) and 4 Å molecular sieves, and the mixture was stirred at room temperature for 5 minutes. To the mixture was then added Tf₂NH (0.18 g, 0.63 mmol) and the reaction mixture was stirred at room temperature for 10 minutes. Although there's still DXd remaining according to LCMS, the reaction was quenched by aq. TFA (0.1%, 0.05 mL). The mixture was directly separated by reversed phase flash chromatography (0-100% acetonitrile in aq. TFA (0.1%)) to give DXd (40 mg, 65% recovered yield) and 5a (Fmoc-P1) (31 mg, ESI m/z: 803 (M+H)⁺) as a light-yellow solid, which was dissolved in DMF (1 mL). To the 5a solution was added diethylamine (0.1 mL) and the reaction mixture was stirred at room temperature for an hour until Fmoc was totally removed according to LCMS. The resulting mixture was directly purified by prep-HPLC (5-95% acetonitrile in aq. TFA (0.1%)) to give P1 (15 mg, 17% yield, TFA salt) as a light-yellow solid. ESI m/z: 580.3 (M+H)⁺.

### Example 7. Exemplary Synthesis of di-aminoacid-ProDXd (Scheme 2C)

### P8

### 2-amino-N-({[({[(10S,23S)-10-ethyl-18-fluoro-10-hydroxy-19-methyl-5,9-dioxo-8-oxa-4,15-diazahexacyclo[14.7.1.0^{2,14}.0^{4,13}.0^{6,11}.0^{20,24}]tetracosa-1,6(11),12,14,16,18,20(24)-heptaen-23-yl]carbamoyl}methoxy)methyl]carbamoyl}methyl)acetamide (P8)

[chemical structure]

[0907] To a solution of N-Fmoc-glycine (16.2 mg, 0.054 mmol) in DMF (1 mL) were added HATU (30.9 mg, 0.081 mmol) and DIPEA (21 mg, 0.108 mmol), and the reaction mixture was stirred at room temperature for 15 minutes. To the stirred mixture was added compound P1 (30 mg, 0.054 mmol, TFA salt), and the reaction mixture was stirred at room temperature for an hour, which was monitored by LCMS. To the resulting mixture was then added diethylamine (1 mL) and the mixture was stirred at room temperature for an hour until Fmoc was totally removed according to LCMS. The volatiles were removed in vacuo and the residual mixture was directly separated by prep-HPLC (5-95% acetonitrile in aq. TFA (0.1%)) to give P8 (11 mg, 31% yield, TFA salt) as a light-yellow solid. ESI m/z: 637 (M+H)⁺. ¹H NMR (400 MHz, DMSO_{d6}) 68.88 (t, J=6.4 Hz, 1H), 8.65 (t, J=5.6 Hz, 1H), 8.54 (d, J=8.8 Hz, 1H), 8.01 (br s, 3H), 7.80 (d, J=10.4 Hz, 1H), 7.31 (s, 1H), 6.55 (s, 1H), 5.62-5.56 (m, 1H), 5.42 (s, 2H), 5.19 (s, 2H), 4.65 (d, J=6.4 Hz, 2H), 4.01 (s, 2H), 3.86 (d, J=5.6 Hz, 2H), 3.67 (s, 2H), 3.24-3.09 (m, 2H), 2.39 (s, 3H), 2.24-2.11 (m, 2H), 1.94-1.79 (m, 2H), 0.87 (t, J=7.2 Hz, 3H) ppm. ¹⁹F NMR (376 MHz, DMSO_{d6}) δ −73 (TFA), −111 (Ar-F) ppm.

### Example 8. Synthesis of 2-[2-({[(9H-fluoren-9-yl)methoxy]carbonyl}amino)ethanesulfonamido]acetic acid (2i)

[chemical structure]

[0909] To a stirred solution of tert-butyl glycinate (0.42 g, 2.5 mmol) in DMF (8 mL) were added N-Fmoc-2-aminoethanesulfonyl chloride (0.83 g, 2.3 mmol) and DIPEA (0.88 g, 6.8 mmol) at 0° C. The reaction was stirred at room temperature for 2 hours, which was monitored by LCMS. The resulting mixture was directly purified by reversed phase flash chromatography (0-60% acetonitrile in aq. TFA (0.1%)) to give a white solid (0.23 g, ESI m/z: 483 (M+Na)+) which was dissolved in DCM (10 mL). To the solution was added TFA (1 mL), and the reaction mixture was stirred at room temperature for 8 hours, which was monitored by LCMS. The mixture was concentrated in vacuo to give compound 2i (0.19 g, 21% yield) as a yellow solid, which was used for the next step without further purification. ESI m/z: 427 (M+Na)+, 405 (M+H)⁺.

### Synthesis of Linker-Payloads

### Example 9. Exemplary Synthesis of Linker-Payloads by Route 1 (Scheme 4A)

### LP1 (M2980) Synthesized from Exatecan Reacted with Intermediate Fa

### {4-[(2S)-5-(carbamoylamino)-2-[(2S)-2-{1-[2-(cyclooct-2-yn-1-yloxy)acetamido]-3,6,9,12-tetraoxapentadecan-15-amido}-3-methylbutanamido]pentanamido]phenyl}methyl N-({[({[(10S,23S)-10-ethyl-18-fluoro-10-hydroxy-19-methyl-5,9-dioxo-8-oxa-4,15-diazahexacyclo[14.7.1.0^{2,14}.0^{4,13}.0^{6,11}.0^{20,24}]tetracosa-1,6(11),12,14,16,18,20(24)-heptaen-23-yl]carbamoyl}methoxy)methyl]carbamoyl}methyl)carbamate (LP1)

[chemical structure]

[0911] To a stirred solution of compound F (see example 26) (48 mg, 49 μmol, 88% purity) in DMF (1 mL) were added HATU (20 mg, 54 μmol) and DIPEA (13 mg, 98 μmol) at 25° C., and the mixture was stirred at 25° C. for 15 minutes. To a mixture of Exatecan mesylate (26 mg, 49 μmol) in DMF (0.8 mL) was added DIPEA (6.3 mg, 49 μmol) at 0° C., and the Exatecan solution was stirred at 25° C. for 15 minutes. The two solutions were mixed at 25° C. and the mixture was stirred at 25° C. for 16 hours, which was monitored by LCMS. The resulting mixture was directly purified by reversed phase flash chromatography (5-95% acetonitrile in aq. TFA (0.1%) in 60 minutes, flow rate 75 mL/min.) to give LP1 (35 mg, 51% yield, 98% purity in HPLC) as a white solid. ESI m/z: 1396 (M+H)⁺. ¹H NMR (400 MHz, DMSO_{d6}) δ 10.00 (s, 1H), 8.80 (t, J=6.4 Hz, 1H), 8.51 (d, J=8.8 Hz, 1H), 8.13 (d, J=7.6 Hz, 1H), 7.90 (d, J=8.8 Hz, 1H), 7.79 (d, J=10.8 Hz, 1H), 7.65-7.50 (m, 3H), 7.43 (t, J=6.0 Hz, 1H), 7.31 (s, 1H), 7.27 (d, J=8.8 Hz, 2H), 6.54 (s, 1H), 5.98 (t, J=5.2 Hz, 1H), 5.63-5.57 (m, 1H), 5.41 (s, 4H), 5.21 (s, 2H), 4.92 (s, 2H), 4.62 (d, J=6.4 Hz, 2H), 4.43-4.33 (m, 1H), 4.31-4.17 (m, 2H), 4.01 (s, 2H), 3.86 (d, J=14.4 Hz, 1H), 3.75 (d, J=14.8 Hz, 1H), 3.67-3.54 (m, 3H), 3.53-3.46 (m, 12H), 3.44-3.39 (m, 2H), 3.27-3.10 (m, 4H), 3.06-2.90 (m, 2H), 2.47-2.32 (m, 5H), 2.26-1.64 (m, 14H), 1.63-1.52 (m, 3H), 1.47-1.32 (m, 3H), 0.90-0.80 (m, 9H) ppm. ¹³C NMR (100 MHz, DMSO_{d6}) δ 174.77, 169.55, 168.95, 167.68, 167.16,161.10, 158.63, 157.39, 154.93, 150.50, 148.30, 146.11, 143.38, 138.89, 137.01, 134.57, 129.97, 123.39, 122.06, 121.87, 119.88, 117.41, 117.30, 108.08, 99.18, 95.12, 90.49, 70.73, 70.55, 68.18, 68.11, 67.89, 67.20, 66.23, 65.31, 63.69, 55.98, 51.52, 47.95, 43.14, 41.97, 40.04, 36.42, 34.34, 32.25, 28.95, 28.72, 27.63, 26.25, 25.18, 24.23, 22.21, 18.38, 17.55, 16.47, 9.22, 6.10 ppm. ¹⁹F NMR (376 MHz, DMSO_{d6}) δ −74.132 (0.3F, CF₃CO₂H), −111.314 (1F) ppm.

### Example 10. Exemplary Synthesis of Linker-payloads by route 2 (Scheme 4B)

### LP1 (M2980) synthesized from DXd reacted with intermediate Ea {4-[(2S)-5-(carbamoylamino)-2-[(2S)-2-{1-[2-(cyclooct-2-yn-1-yloxy)acetamido]-3,6,9,12-tetraoxapentadecan-15-amido}-3-methylbutanamido]pentanamido]phenyl}methyl N-({[({[(10S,23S)-10-ethyl-18-fluoro-10-hydroxy-19-methyl-5,9-dioxo-8-oxa-4,15-diazahexacyclo[14.7.1.0^{2,14}.0^{4,13}.0^{6,11}.0^{20,24}]tetracosa-1,6(11),12,14,16,18,20(24)-heptaen-23-yl]carbamoyl}methoxy)methyl]carbamoyl}methyl)carbamate (LP1)

[chemical structure]

[0913] To a stirred mixture of intermediate Ea (see example 25) (50 mg, 52 μmol) in dry THF (5 mL) were added DXd (26 mg, 52 μmol) and 4A molecular sieves, and the mixture was stirred at 20° C. for 5 minutes before the addition of trifluoromethanesulfonimide (73 mg, 0.25 mmol). The reaction mixture was stirred at 20° C. for 10 minutes until intermediate Ea was mostly consumed, which was monitored by LCMS. The 4A molecular sieves was removed by filtration and the filtrate was concentrated in vacuo. The residue was purified by reversed phase flash chromatography (5-95% acetonitrile in aq. TFA (0.1%)) to give LP1 (29 mg, 39% yield) as a light-yellow solid. ESI m/z: 699.1 (M/2+H)⁺.

### Example 11. Synthesis of Linker-payloads by route 3a (Scheme 4C)

[0914] General procedure of linker-ProDXds by route 3a.

[0915] To a solution of intermediate D (1.0-1.2 equiv.) in DMF (0.15 mM) were added HOBt (0.5 equiv.) or HOAt (0.5 equiv.), DIPEA (3.0 equiv.) and payload (1.0 equiv.), and the reaction mixture was stirred at room temperature for 2 hours, which was monitored by LCMS. The resulting mixture was directly purified by reversed phase flash chromatography to give linker-ProDXd as a white solid.

### LP1

### {4-[(2S)-5-(carbamoylamino)-2-[(2S)-2-{1-[2-(cyclooct-2-yn-1-yloxy)acetamido]-3,6,9,12-tetraoxapentadecan-15-amido}-3-methylbutanamido]pentanamido]phenyl}methyl N-({[({[(10S,23S)-10-ethyl-18-fluoro-10-hydroxy-19-methyl-5,9-dioxo-8-oxa-4,15-diazahexacyclo[14.7.1.0^{2,14}.0^{4,13}.0^{6,11}.0^{20,24}]tetracosa-1,6(11),12,14,16,18,20(24)-heptaen-23-yl]carbamoyl}methoxy)methyl]carbamoyl}methyl)carbamate (LP1)

[chemical structure]

[0917] Following the general procedure starting from payload P1 (0.85 g, 1.2 mmol) catalyzed by HOBt, linker-payload LP1 (1.1 g, 62% yield) was obtained as a white solid after purification by prep-HPLC (5-60% acetonitrile in aq. formic acid (0.1%)). ESI m/z: 699.0 (M/2+H)+. ¹H NMR (400 MHz, DMSO_{d6}) δ 10.00 (s, 1H), 8.80 (t, J=6.4 Hz, 1H), 8.51 (d, J=8.8 Hz, 1H), 8.13 (d, J=7.6 Hz, 1H), 7.90 (d, J=8.8 Hz, 1H), 7.79 (d, J=10.8 Hz, 1H), 7.65-7.50 (m, 3H), 7.43 (t, J=6.0 Hz, 1H), 7.31 (s, 1H), 7.27 (d, J=8.8 Hz, 2H), 6.54 (s, 1H), 5.98 (t, J=5.2 Hz, 1H), 5.63-5.57 (m, 1H), 5.41 (s, 4H), 5.21 (s, 2H), 4.92 (s, 2H), 4.62 (d, J=6.4 Hz, 2H), 4.43-4.33 (m, 1H), 4.31-4.17 (m, 2H), 4.01 (s, 2H), 3.86 (d, J=14.4 Hz, 1H), 3.75 (d, J=14.8 Hz, 1H), 3.67-3.46 (m, 15H), 3.44-3.39 (m, 2H), 3.27-3.10 (m, 4H), 3.06-2.90 (m, 2H), 2.47-2.32 (m, 5H), 2.26-1.64 (m, 14H), 1.63-1.52 (m, 3H), 1.47-1.32 (m, 3H), 0.90-0.80 (m, 9H) ppm. ¹⁹F NMR (376 MHz, DMSO_{d6}) δ −111 ppm.

### LP2

### {4-[(2S)-5-(carbamoylamino)-2-[(2S)-2-{1-[2-(cyclooct-2-yn-1-yloxy)acetamido]-3,6,9,12-tetraoxapentadecan-15-amido}-3-methylbutanamido]pentanamido]phenyl}methyl N-[(1S)-1-{[({[(10S,23S)-10-ethyl-18-fluoro-10-hydroxy-19-methyl-5,9-dioxo-8-oxa-4,15-diazahexacyclo[14.7.1.0^{2,14}.0^{4,13}.0^{6,11}.0^{20,24}]tetracosa-1,6(11),12,14,16,18,20(24)-heptaen-23-yl]carbamoyl}methoxy)methyl]carbamoyl}-2-hydroxyethyl]carbamate (LP2)

[chemical structure]

[0919] Following the general procedure starting from payload P2 (18 mg, 29 μmol) catalyzed by HOAt, linker-payload LP2 (19 mg, 45% yield) was obtained as a white solid after purification by prep-HPLC (5-95% acetonitrile in aq. TFA (0.1%)). ESI m/z: 714 (M/2+H)⁺. ¹H NMR (400 MHz, DMSO_{d6}) δ 10.00 (s, 1H), 8.82 (t, J=6.7 Hz, 1H), 8.50 (d, J=8.6 Hz, 1H), 8.14 (d, J=7.2 Hz, 1H), 7.89 (d, J=8.6 Hz, 1H), 7.79 (d, J=11.0 Hz, 1H), 7.66-7.54 (m, 3H), 7.35-7.24 (m, 3H), 7.18 (d, J=8.2 Hz, 1H), 6.59-6.46 (m, 1H), 5.99 (s, 1H), 5.65-5.55 (m, 1H), 5.42 (s, 3H), 5.21 (s, 2H), 4.97-4.83 (m, 2H), 4.67-4.57 (m, 2H), 4.41-4.34 (m, 1H), 4.30-4.21 (m, 2H), 4.00 (s, 2H), 3.99-3.65 (m, 3H), 3.62-3.57 (m, 2H), 3.53-3.46 (m, 12H), 3.28-3.16 (m, 4H), 3.06-2.81 (m, 3H), 2.39 (s, 3H), 2.26-2.02 (m, 6H), 2.02-1.80 (m, 6H), 1.78-1.66 (m, 3H), 1.62-1.52 (m, 3H), 1.48-1.22 (m, 8H), 0.92-0.77 (m, 9H) ppm.

### LP3

### {4-[(2S)-5-(carbamoylamino)-2-[(2S)-2-{1-[2-(cyclooct-2-yn-1-yloxy)acetamido]-3,6,9,12-tetraoxapentadecan-15-amido}-3-methylbutanamido]pentanamido]phenyl}methyl N-[(1S)-3-carbamoyl-1-{[({[(10S,23S)-10-ethyl-18-fluoro-10-hydroxy-19-methyl-5,9-dioxo-8-oxa-4,15-diazahexacyclo[14.7.1.0^{2,14}.0^{4,13}.0^{6,11}.0^{20,24}]tetracosa-1,6(11),12,14,16,18,20(24)-heptaen-23-yl]carbamoyl}methoxy)methyl]carbamoyl}propyl]carbamate (LP3)

[chemical structure]

[0921] Following the general procedure starting from payload P3 (14 mg, 22 μmol) catalyzed by HOAt, linker-payload LP3 (16 mg, 49% yield) was obtained as a white solid after purification by prep-HPLC (5-95% acetonitrile in aq. TFA (0.1%)). ESI m/z: 734 (M/2+H)⁺. ¹H NMR (400 MHz, DMSO_{d6}) δ 10.00 (s, 1H), 8.83 (t, J=6.5 Hz, 1H), 8.54 (d, J=8.6 Hz, 1H), 8.14 (d, J=7.0 Hz, 1H), 7.89 (d, J=8.7 Hz, 1H), 7.79 (d, J=10.8 Hz, 1H), 7.66-7.51 (m, 3H), 7.44 (d, J=7.4 Hz, 1H), 7.31-7.23 (m, 3H), 6.78 (s, 1H), 6.59-6.48 (m, 1H), 6.03-5.94 (m, 1H), 5.64-5.56 (m, 1H), 5.42 (s, 3H), 5.22 (s, 2H), 4.95-4.81 (m, 2H), 4.68-4.56 (m, 2H), 4.42-4.34 (m, 1H), 4.31-4.19 (m, 2H), 4.01 (s, 2H), 3.87 (d, J=14.8 Hz, 2H), 3.75 (d, J=14.8 Hz, 1H), 3.64-3.55 (m, 2H), 3.53-3.44 (m, 12H), 3.28-3.20 (m, 4H), 3.08-2.90 (m, 3H), 2.40 (s, 3H), 2.24-2.02 (m, 8H), 2.01-1.50 (m, 16H), 1.46-1.29 (m, 4H), 0.90-0.76 (m, 9H) ppm.

### LP4

### (4S)-4-{[({4-[(2S)-5-(carbamoylamino)-2-[(2S)-2-{1-[2-(cyclooct-2-yn-1-yloxy)acetamido]-3,6,9,12-tetraoxapentadecan-15-amido}-3-methylbutanamido]pentanamido]phenyl}methoxy)carbonyl]amino}-4-{[({[(10S,23S)-10-ethyl-18-fluoro-10-hydroxy-19-methyl-5,9-dioxo-8-oxa-4,15-diazahexacyclo[14.7.1.0^{2,14}.0^{4,13}.0^{6,11}.0^{20,24}]tetracosa-1,6(11),12,14,16,18,20(24)-heptaen-23-yl]carbamoyl}methoxy)methyl]carbamoyl}butanoic acid (LP4)

[chemical structure]

[0923] Following the general procedure starting from payload P4 (16 mg, 25 μmol) catalyzed by HOAt, linker-payload LP4 (12 mg, 35% yield) was obtained as a white solid after purification by prep-HPLC (5-95% acetonitrile in aq. TFA (0.1%)). ESI m/z: 735 (M/2+H)⁺. ¹H NMR (400 MHz, DMSO_{d6}) δ 9.99 (s, 1H), 8.89-8.82 (m, 1H), 8.53 (d, J=8.5 Hz, 1H), 8.12 (d, J=7.5 Hz, 1H), 7.88 (d, J=8.9 Hz, 1H), 7.78 (d, J=11.1 Hz, 1H), 7.65-7.51 (m, 3H), 7.44 (d, J=7.4 Hz, 1H), 7.33-7.22 (m, 2H), 6.53 (s, 1H), 6.04-5.95 (m, 1H), 5.64-5.54 (m, 1H), 5.42 (s, 3H), 5.21 (s, 2H), 4.97-4.81 (m, 2H), 4.67-4.56 (m, 2H), 4.41-4.33 (m, 1H), 4.31-4.18 (m, 2H), 4.00 (s, 2H), 3.99-3.65 (m, 3H), 3.63-3.55 (m, 2H), 3.54-3.42 (m, 12H), 3.27-3.17 (m, 4H), 3.09-2.87 (m, 3H), 2.39 (s, 3H), 2.27-1.13 (m, 28H), 0.98-0.64 (m, 9H) ppm.

### LP5

### {4-[(2S)-5-(carbamoylamino)-2-[(2S)-2-{1-[2-(cyclooct-2-yn-1-yloxy)acetamido]-3,6,9,12-tetraoxapentadecan-15-amido}-3-methylbutanamido]pentanamido]phenyl}methyl N-[(5S)-5-amino-5-{[({[(10S,23S)-10-ethyl-18-fluoro-10-hydroxy-19-methyl-5,9-dioxo-8-oxa-4,15-diazahexacyclo[14.7.1.0²,4.0^{4,13}.0^{6,11}.0^{20,24}]tetracosa-1,6(11),12,14,16,18,20(24)-heptaen-23-yl]carbamoyl}methoxy)methyl]carbamoyl}pentyl]carbamate (LP5)

[chemical structure]

[0925] Following the general procedure starting from compound 5da (32 mg, 37 μmol) with intermediate D catalyzed by HOBt, Fmoc-LP5 (35 mg, 56% yield) was obtained as a white solid after purification by prep-HPLC (5-95% acetonitrile in aq. TFA (0.1%)). To a solution of Fmoc-LP5 (35 mg, 21 μmol) in DMF (2 mL) was added diethylamine (7.6 mg, 0.10 mmol), and the reaction mixture was stirred at room temperature for 2 hours until Fmoc was totally removed according to LCMS. The resulting mixture was directly purified by reversed phase flash chromatography (5-95% acetonitrile in aq. TFA (0.01%)) to give LP5 (9.6 mg, 31% yield) as a white solid. ESI m/z: 734 (M/2+H)⁺. ¹H NMR (400 MHz, DMSO_{d6}) δ 10.00 (d, J=13.5 Hz, 1H), 9.19-9.04 (m, 1H), 9.01-8.87 (m, 1H), 8.65-8.55 (m, 1H), 8.20-8.08 (m, 1H), 7.92-7.86 (m, 1H), 7.85-7.75 (m, 1H), 7.71 (s, 1H), 7.63-7.54 (m, 2H), 7.33-7.15 (m, 3H), 6.54 (s, 1H), 6.06-5.97 (m, 1H), 5.63-5.56 (m, 1H), 5.45-5.39 (m, 2H), 5.20 (s, 1H), 5.14-5.04 (m, 1H), 4.90 (d, J=6.1 Hz, 2H), 4.69-4.57 (m, 2H), 4.40-4.33 (m, 1H), 4.31-4.18 (m, 2H), 4.10-3.96 (m, 2H), 3.99-3.65 (m, 3H), 3.65-3.55 (m, 4H), 3.53-3.44 (m, 12H), 3.29-3.19 (m, 4H), 3.03-2.35 (m, 7H), 2.27-1.17 (m, 32H), 0.91-0.63 (m, 9H) ppm.

### LP5C

### {4-[(2S)-5-(carbamoylamino)-2-[(2S)-3-methyl-2-(1-{2-[4-(6-methyl-1,2,4,5-tetrazin-3-yl)phenyl]acetamido}-3,6,9,12-tetraoxapentadecan-15-amido)butanamido]pentanamido]phenyl}methyl N-[(5S)-5-amino-5-{[({[(10S,23S)-10-ethyl-18-fluoro-10-hydroxy-19-methyl-5,9-dioxo-8-oxa-4,15-diazahexacyclo[14.7.1.0²,4.0^{4,13}.0^{6,11}.0^{20,24}]tetracosa-1,6(11),12,14,16,18,20(24)-heptaen-23-yl]carbamoyl}methoxy)methyl]carbamoyl}pentyl]carbamate (LP5C)

[chemical structure]

[0927] Following the similar procedure as LP5 except using intermediate Dd instead of intermediate Da, linker-payload LP5C (15 mg, 17% yield) was obtained as a red solid after purification by prep-HPLC (5-95% acetonitrile in aq. TFA (0.1%)). ESI m/z: 758 (M/2+H)⁺.

### LP7

### {4-[(2S)-5-(carbamoylamino)-2-[(2S)-2-{1-[2-(cyclooct-2-yn-1-yloxy)acetamido]-3,6,9,12-tetraoxapentadecan-15-amido}-3-methylbutanamido]pentanamido]phenyl}methyl N-[(1S)-1-{[({[(10S,23S)-10-ethyl-18-fluoro-10-hydroxy-19-methyl-5,9-dioxo-8-oxa-4,15-diazahexacyclo[14.7.1.0^{2,14}.0^{4,13}.0^{6,11}.0^{20,24}]tetracosa-1,6(11),12,14,16,18,20(24)-heptaen-23-yl]carbamoyl}methoxy)methyl]carbamoyl}-2-phenylethyl]carbamate (LP7)

[chemical structure]

[0929] Following the general procedure starting from payload P7 (17 mg, 25 μmol) catalyzed by HOAt, linker-payload LP7 (17 mg, 46% yield) was obtained as a white solid after purification by prep-HPLC (5-95% acetonitrile in aq. TFA (0.1%)). ESI m/z: 744 (M/2+H)⁺. ¹H NMR (400 MHz, DMSO_{d6}) δ 9.98 (s, 1H), 8.97 (t, J=6.8 Hz, 1H), 8.54 (d, J=8.7 Hz, 1H), 8.13 (d, J=7.2 Hz, 1H), 7.89 (d, J=8.8 Hz, 1H), 7.79 (d, J=11.0 Hz, 1H), 7.62 (t, J=5.5 Hz, 1H), 7.55 (d, J=8.5 Hz, 2H), 7.49 (d, J=8.2 Hz, 1H), 7.30 (s, 1H), 7.26-7.20 (m, 4H), 7.18-7.12 (m, 2H), 6.03-5.95 (m, 1H), 5.64-5.56 (m, 1H), 5.47-5.34 (m, 3H), 5.26-5.14 (m, 2H), 4.86-4.75 (m, 2H), 4.70-4.57 (m, 2H), 4.41-4.33 (m, 1H), 4.31-4.12 (m, 4H), 3.99 (s, 2H), 3.99-3.65 (m, 3H), 3.63-3.57 (m, 3H), 3.50-3.47 (m, 12H), 3.28-3.10 (m, 4H), 2.98-2.90 (m, 1H), 2.39 (s, 3H), 2.28-1.16 (m, 25H), 0.87-0.80 (m, 9H) ppm.

### LP8

### {4-[(2S)-5-(carbamoylamino)-2-[(2S)-2-{1-[2-(cyclooct-2-yn-1-yloxy)acetamido]-3,6,9,12-tetraoxapentadecan-15-amido}-3-methylbutanamido]pentanamido]phenyl}methyl N-{[({[({[(10S,23S)-10-ethyl-18-fluoro-10-hydroxy-19-methyl-5,9-dioxo-8-oxa-4,15-diazahexacyclo[14.7.1.0²,4.0^{4,13}.0^{6,11}.0^{20,24}]tetracosa-1,6(11),12,14,16,18,20(24)-heptaen-23-yl]carbamoyl}methoxy)methyl]carbamoyl}methyl)carbamoyl]methyl}carbamate (LP8)

[chemical structure]

[0931] Following the general procedure starting from payload P8 (20 mg, 32 μmol) catalyzed by HOBt, linker-payload LP8 (14 mg, 29% yield) was obtained as a white solid after purification by prep-HPLC (5-95% acetonitrile in aq. TFA (0.1%)). ESI m/z: 727 (M/2+H)⁺. ¹H NMR (400 MHz, DMSO_{d6}) δ 9.99 (s, 1H), 8.72-8.68 (m, 1H), 8.51 (d, J=8.5 Hz, 1H), 8.19-8.12 (m, 2H), 7.88 (d, J=9.1 Hz, 1H), 7.80 (d, J=11.2 Hz, 1H), 7.63-7.55 (m, 3H), 7.47-7.43 (m, 1H), 7.31 (s, 1H), 7.28 (d, J=8.3 Hz, 2H), 6.53 (s, 1H), 6.00-5.95 (m, 1H), 5.62-5.58 (m, 1H), 5.42 (d, J=4.9 Hz, 3H), 5.21 (s, 2H), 4.94 (s, 2H), 4.63 (d, J=6.4 Hz, 2H), 4.39-4.35 (m, 1H), 4.28-4.22 (m, 2H), 4.01 (s, 2H), 3.85 (s, 1H), 3.77 (s, 1H), 3.74-3.70 (m, 2H), 3.66-3.57 (m, 4H), 3.52-3.39 (m, 14H), 3.28-3.21 (m, 4H), 3.04-2.97 (m, 2H), 2.40 (s, 3H), 2.25-2.13 (m, 6H), 2.01-1.82 (m, 9H), 1.61-1.55 (m, 3H), 1.49-1.36 (m, 5H), 0.91-0.78 (m, 9H) ppm.

### LP9

### {4-[(2S)-5-(carbamoylamino)-2-[(2S)-2-{1-[2-(cyclooct-2-yn-1-yloxy)acetamido]-3,6,9,12-tetraoxapentadecan-15-amido}-3-methylbutanamido]pentanamido]phenyl}methyl N-({[({[(10S,23S)-10-ethyl-18-fluoro-10-hydroxy-19-methyl-5,9-dioxo-8-oxa-4,15-diazahexacyclo[14.7.1.0^{2,14}.0^{4,13}.0^{6,11}.0^{20,24}]tetracosa-1,6(11),12,14,16,18,20(24)-heptaen-23-yl]carbamoyl}methoxy)methyl](methyl)carbamoyl}methyl)carbamate (LP9)

[chemical structure]

[0933] Following the general procedure starting from payload P9 (6.0 mg, 10 μmol) catalyzed by HOBt, linker-payload LP9 (5.0 mg, 36% yield) was obtained as a white solid after purification by prep-HPLC (5-95% acetonitrile in aq. TFA (0.1%)). ESI m/z: 706 (M/2+H)⁺. ¹H NMR (400 MHz, DMSO_{d6}) δ 9.99 (s, 1H), 8.63-8.50 (m, 1H), 8.15-8.08 (m, 1H), 7.88-7.78 (m, 2H), 7.59-7.57 (m, 3H), 7.30-7.22 (m, 4H), 6.52 (s, 1H), 5.98 (s, 1H), 5.61 (s, 1H), 5.42 (br, 4H), 5.22 (s, 2H), 4.88-4.82 (m, 4H), 4.42-4.20 (m, 4H), 4.09-3.74 (m, 8H), 3.59-3.49 (m, 13H), 3.25-3.23 (m, 4H), 3.00-2.88 (m, 6H), 2.39-2.38 (m, 4H), 2.20-2.16 (m, 3H), 1.97-1.73 (m, 9H), 1.56-1.35 (m, 7H), 0.86-0.83 (m, 9H) ppm.

### Example 12. Exemplary Synthesis of Linker-payloads by route 3b (Scheme 4D)

### LP1 synthesized from Fmoc-P1 (5a) reacted with intermediate D using HOBt {4-[(2S)-5-(carbamoylamino)-2-[(2S)-2-{1-[2-(cyclooct-2-yn-1-yloxy)acetamido]-3,6,9,12-tetraoxapentadecan-15-amido}-3-methylbutanamido]pentanamido]phenyl}methyl N-({[({[(10S,23S)-10-ethyl-18-fluoro-10-hydroxy-19-methyl-5,9-dioxo-8-oxa-4,15-diazahexacyclo[14.7.1.0^{2,14}.0^{4,13}.0^{6,11}.0^{20,24}]tetracosa-1,6(11),12,14,16,18,20(24)-heptaen-23-yl]carbamoyl}methoxy)methyl]carbamoyl}methyl)carbamate (LP1)

[chemical structure]

[0935] To a yellow solution of 5a (1.7 g, 2 mmol) in DMF (17 mL) were added DBU (30 mg, 0.20 mmol) and triethylamine (0.40 g, 4.0 mmol) at 25° C., and the mixture was stirred at 25° C. for 15 minutes. To the reaction mixture were added HOBt (0.14 g, 1.0 mmol) and intermediate D (2.0 g, 2.1 mmol), and the resulting clear solution was stirred at 25° C. for 16 hours. The resulting mixture was poured into MTBE (150 mL) and the heterogeneous mixture was stirred at room temperature for 5 minutes. The MTBE layer, containing most of Fmoc-ene side-product and bases, was then separated off. The black oil in the bottom was diluted with DMF (20 mL) and the solution was purified by prep-HPLC (5-95% acetonitrile in aq. TFA (0.01%)) to give LP1 (1.5 g, 55% yield) as a white solid. ESI m/z: 1396 (M+H)⁺. ¹H NMR (400 MHz, DMSO_{d6}) δ 10.00 (t, J=6.4 Hz, 1H), 8.80 (t, J=6.4 Hz, 1H), 8.51 (d, J=8.8 Hz, 1H), 8.13 (d, J=7.6 Hz, 1H), 7.90 (d, J=8.8 Hz, 1H), 7.79 (d, J=10.8 Hz, 1H), 7.65-5.50 (m, 3H), 7.43 (t, J=6.0 Hz, 1H), 7.31 (s, 1H), 7.27 (d, J=8.8 Hz, 2H), 6.54 (s, 1H), 5.98 (t, J=5.2 Hz, 1H), 5.63-5.57 (m, 1H), 5.41 (s, 4H), 5.21 (s, 2H), 4.92 (s, 2H), 4.62 (d, J=6.4 Hz, 2H), 4.43-4.33 (m, 1H), 4.31-4.17 (m, 2H), 4.01 (s, 2H), 3.86 (d, J=14.4 Hz, 1H), 3.75 (d, J=14.8 Hz, 1H), 3.67-3.54 (m, 4H), 3.53-3.46 (m, 12H), 3.44-3.39 (m, 2H), 3.27-3.10 (m, 4H), 3.06-2.90 (m, 2H), 2.47-2.32 (m, 5H), 2.26-1.64 (m, 14H), 1.63-1.52 (m, 3H), 1.47-1.32 (m, 3H), 0.90-0.80 (m, 9H) ppm. ¹⁹F NMR (376 MHz, DMSO_{d6}) δ −111 (Ar-F) ppm.

### LP1 synthesized from Fmoc-P1 (5a) reacted with intermediate D using MeHYQ (small scale)

### {4-[(2S)-5-(carbamoylamino)-2-[(2S)-2-{1-[2-(cyclooct-2-yn-1-yloxy)acetamido]-3,6,9,12-tetraoxapentadecan-15-amido}-3-methylbutanamido]pentanamido]phenyl}methyl N-({[({[(10S,23S)-10-ethyl-18-fluoro-10-hydroxy-19-methyl-5,9-dioxo-8-oxa-4,15-diazahexacyclo[14.7.1.0^{2,14}.0^{4,13}.0^{6,11}.0^{20,24}]tetracosa-1,6(11),12,14,16,18,20(24)-heptaen-23-yl]carbamoyl}methoxy)methyl]carbamoyl}methyl)carbamate (LP1)

[chemical structure]

[0937] To a yellow solution of 5a (10 mg, 1 eq.), intermediate D (12.5 mg, 1.05 eq.) and 4-methyl-2-hydroxyquinoline (MeHYQ) (1.0 mg, 0.5 mmol) in DMF (130 uL) were added DBU (0.24 mg, 1.6 umol) and triethylamine (3.2 mg, 32 umol) at 25° C. The clear solution was stirred at 50° C. for 1.5 hours, which was monitored by LCMS. After cooled to room temperature, the resulting mixture was poured into stirred MTBE (600 uL) at 0-10° C. and brown oil appeared, which was collected after separation to remove the MTBE layer. The oil was then purified by reversed phase flash chromatography (5-95% acetonitrile in aq. TFA (0.01%)) to give LP1 (10 mg, 90% yield) as a white solid. ESI m/z: 699.0 (M/2+H)⁺.

### LP1 synthesized from Fmoc-P1 (5a) reacted with intermediate D using MeHYQ (large scale)

### {4-[(2S)-5-(carbamoylamino)-2-[(2S)-2-{1-[2-(cyclooct-2-yn-1-yloxy)acetamido]-3,6,9,12-tetraoxapentadecan-15-amido}-3-methylbutanamido]pentanamido]phenyl}methyl N-({[({[(10S,23S)-10-ethyl-18-fluoro-10-hydroxy-19-methyl-5,9-dioxo-8-oxa-4,15-diazahexacyclo[14.7.1.0^{2,14}.0^{4,13}.0^{6,11}.0^{20,24}]tetracosa-1,6(11),12,14,16,18,20(24)-heptaen-23-yl]carbamoyl}methoxy)methyl]carbamoyl}methyl)carbamate (LP1)

[chemical structure]

[0939] To a yellow solution of Fmoc-ProDXd (5a) (13 g, 16 mmol), intermediate Da (16 g, 17 mmol), and 4-methyl-2-hydroxyquinoline (MeHYQ) (1.3 g, 8.2 mmol) in DMF (130 mL) were added DBU (0.24 g, 1.6 mmol) and triethylamine (3.2 g, 32 mmol) at 25° C. The clear solution was stirred at 50° C. for 6 hours, which was monitored by LCMS. After cooled to room temperature, the resulting mixture was poured into stirred MTBE (600 mL) at 0-10° C. and brown oil appeared, which was collected after separation to remove the MTBE layer. The oil was then purified by reversed phase flash chromatography (5-95% acetonitrile in aq. TFA (0.01%)) to give LP1 (13 g, 58% yield) as a white solid. ESI m/z: 698.8 (M/2+H)⁺.

[0940] ¹H NMR (400 MHz, DMSO_{d6}) δ 10.00 (t, J=6.4 Hz, 1H), 8.80 (t, J=6.4 Hz, 1H), 8.51 (d, J=8.8 Hz, 1H), 8.13 (d, J=7.6 Hz, 1H), 7.90 (d, J=8.8 Hz, 1H), 7.79 (d, J=10.8 Hz, 1H), 7.65-5.50 (m, 3H), 7.43 (t, J=6.0 Hz, 1H), 7.31 (s, 1H), 7.27 (d, J=8.8 Hz, 2H), 6.54 (s, 1H), 5.98 (t, J=5.2 Hz, 1H), 5.63-5.57 (m, 1H), 5.41 (s, 4H), 5.21 (s, 2H), 4.92 (s, 2H), 4.62 (d, J=6.4 Hz, 2H), 4.43-4.33 (m, 1H), 4.31-4.17 (m, 2H), 4.01 (s, 2H), 3.86 (d, J=14.4 Hz, 1H), 3.75 (d, J=14.8 Hz, 1H), 3.67-3.54 (m, 4H), 3.53-3.46 (m, 12H), 3.44-3.39 (m, 2H), 3.27-3.10 (m, 4H), 3.06-2.90 (m, 2H), 2.47-2.32 (m, 5H), 2.26-1.64 (m, 14H), 1.63-1.52 (m, 3H), 1.47-1.32 (m, 3H), 0.90-0.80 (m, 9H) ppm. ¹⁹F NMR (376 MHz, DMSO_{d6}) δ −111 (Ar-F) ppm.

[0941] ¹³C NMR (100 MHz, DMSO_{d6}) δ 172.36, 171.11, 170.65, 170.61, 170.31, 169.20, 168.68, 162.70, 160.23, 158.90, 156.58, 156.43, 152.14, 149.89, 147.79, 147.65, 144.99, 140.48, 138.59, 136.24, 131.52, 128.56, 125.08, 123.65, 123.45, 121.50, 118.83, 109.81, 109.58, 100.73, 96.67, 92.06, 72.30, 72.10, 69.74, 69.48, 68.76, 67.80, 66.87, 65.31, 57.48, 53.07, 49.54, 44.63, 43.53, 41.62, 35.88, 33.83, 30.54, 30.32, 29.19, 27.80, 26.77, 25.80, 23.72, 19.96, 19.13, 18.05, 10.86, 7.69 ppm.

| | Reactant | | | | | | | | | | | | | | | | |
|---|---|---|---|---|---|---|---|---|---|---|---|---|---|---|---|---|---|
| | Fmoc- | | | | Reagents | | | | | | Sol | Temp. | time | puri- | Product LP1 | | |
| # | ProDXd | | Int D | | Et3N | | DBU | | MeHYQ | | DMF | (° C.) | (h) | fication | Amt | Yield | Purity |
| 1 | 100 | mg | 125 | mg | 24 | mg | 1.8 | mg | 9.9 | mg | 1 ml | 50 | 4 | C18 | 80 mg | 46% | 96.9% |
| | 0.12 | mmol | 0.13 | mmol | 0.24 | mmol | 0.012 | mmol | 0.06 | mmol | | | | column | | | in |
| | | | (1.05 eq.) | | (2.0 eq.) | | (0.1 eq.) | | (0.5 eq.) | | | | | | | | HPLC |
| 2 | 1.0 | g | 1.2 | g | 240 | mg | 18 | mg | 99 | mg | 10 ml | 50 | 5 | C18 | 1.0 g | 57% | 96.9% |
| | 1.2 | mmol | 1.3 | mmol | 2.4 | mmol | 0.12 | mmol | 0.60 | mmol | | | | column | | | in |
| | | | (1.05 eq.) | | (2.0 eq.) | | (0.1 eq.) | | (0.5 eq.) | | | | | | | | HPLC |
| 3 | 13 | g | 16 | g | 3.23 | g | 243 | mg | 1.27 | g | 13 ml | 50 | 6 | C18 | 13 g | 58% | 99.9% |
| | 16 | mmol | 16.8 | mmol | 32 | mmol | 1.6 | mmol | 8 | mmol | | | | column | | | in |

| | | | | |
|---|---|---|---|---|
| (1.05 eq.) | (2.0 eq.) | (0.1 eq.) | (0.5 eq.) | HPLC |

Certificate of Analysis of LP1 (1g lot):

### Chemical Structure:

[chemical structure]

| Compound information | Results |
|---|---|
| Mol. Formula | C₆₉H₉₀FN₁₁O₁₉ |
| MW (with salt, solvent.) | 1396.54 |
| Salt/active Substance ratio | N/A |
| Appearance | white solid |
| LC-MS(exact mass) | [M + H]⁺ = 1396.7 |
| HPLC Purity | 99.99% |
| Chiral HPLC Purity | 99ee % |

Certificate of Analysis of LP1 (13g lot)

### Chemical Structure:

[chemical structure]

| Physical and | |
|---|---|
| Chemical Properties | Results |
| Salt | Free base |
| Mol. Formula | C₆₉H₉₀FN₁₁O₁₉ |
| Molecular Weight | 1396.54 |
| Storage | Store solid at −20° C. |
| Appearance | white solid at −20° C., but turns to be solid-oil |
| | at room temperature |
| Solubility | soluble in 10 mM DMSO and 26 uM water |
| Purity | >98% by HPLC and LC-MS |
| Special liability | Light sensitive, unstable at pH <3 or pH >11 |
| Absorbance | at 254 nm and 214 nm |
| Payload class | Topoisomerase I inhibitor |
| Hydrophobicity range | CLogP = 0.72 |

Analytical tests and results

| Item | Criterion |
|---|---|
| HPLC Purity | >98% |
| Chiral HPLC Purity | ee > 98% |

### Example 13. Exemplary 2-step-synthesis of Linker-payloads by route 4 (Scheme 4E)

### LP1 synthesized from P1 with Fmoc-vcPAB and then reacted with intermediate Ba {4-[(2S)-5-(carbamoylamino)-2-[(2S)-2-{1-[2-(cyclooct-2-yn-1-yloxy)acetamido]-3,6,9,12-tetraoxapentadecan-15-amido}-3-methylbutanamido]pentanamido]phenyl}methyl N-({[({[(10S,23S)-10-ethyl-18-fluoro-10-hydroxy-19-methyl-5,9-dioxo-8-oxa-4,15-diazahexacyclo[14.7.1.0^{2,14}.0^{4,13}.0^{6,11}.0^{20,24}]tetracosa-1,6(11),12,14,16,18,20(24)-heptaen-23-yl]carbamoyl}methoxy)methyl]carbamoyl}methyl)carbamate (LP1)

[chemical structure]

### [Step 1] vcPAB-P1

[0945] To a solution of compound Fmoc-vcPAB-PNP (0.36 g, 0.47 mmol, 1.0 eq., commercial) in DMF (2 mL) was added P1 (0.27 g, 0.47 mmol, 1.0 eq.), HOAt (95 mg, 0.70 mmol, 1.5 eq.) and DIPEA (0.12 mg, 0.94 mmol, 2.0 eq.), and the reaction mixture was stirred at room temperature for 4 hours, which was monitored by LCMS. The resulting mixture was directly purified by reversed phase flash chromatography to give the compound Fmoc-vcPAB-P1 (0.22 mg, ESI m/z: 1207 (M+H)⁺) as a yellow solid, which was dissolved in DMF (2 mL). To the solution was added diethylamine (0.2 mL), and the reaction mixture was stirred at room temperature for 2 hours, which was monitored by LCMS. The resulting mixture was directly purified by reversed phase flash chromatography to give vcPAB-P1 (0.16 g, 28% yield from P1) as a white solid. ESI m/z: 1085 (M+H)⁺.

### [Step 2]: LP1

[0946] To a solution of COT-PEG4-acid (intermediate Ba) (63 mg, 0.15 mmol, 1.0 eq., synthesized according to WO2018089373) in DMF (2 mL) were added HATU (83 mg, 0.22 mmol, 1.5 eq.) and DIPEA (58 mg, 0.45 mmol, 3.0 eq.), and the reaction mixture was stirred at room temperature for an hour before the addition of vcPAB-P1 (0.16 g, 0.15 mmol, 1.0 eq.). The reaction mixture was stirred at room temperature for 4 hours, which was monitored by LCMS. The resulting mixture was directly purified by prep-HPLC to give LP1 (20 mg, 10% yield) as a white solid. ESI m/z: 1396 (M+H)⁺.

[0947] LP1A synthesized from P1 with Fmoc-vcPAB and then reacted with intermediate Bb {4-[(2S)-5-(carbamoylamino)-2-[(2S)-2-[1-({[(4E)-cyclooct-4-en-1-yloxy]carbonyl}amino)-3,6,9,12-tetraoxapentadecan-15-amido]-3-methylbutanamido]pentanamido]phenyl}methyl N-({[({[(10S,23S)-10-ethyl-18-fluoro-10-hydroxy-19-methyl-5,9-dioxo-8-oxa-4,15-diazahexacyclo[14.7.1.0^{2,14}.0^{4,13}.0^{6,11}.0^{20,24}]tetracosa-1,6(11),12,14,16,18,20(24)-heptaen-23-yl]carbamoyl}methoxy)methyl]carbamoyl}methyl)carbamate (LP1A)

[chemical structure]

[0948] Following the similar procedure as LP1 except using TCO-PEG4-acid (Bb) instead of Ba, linker-payload LP1A (9.7 mg, 35% yield) was obtained as a white solid. ESI m/z: 692.8 (M/2+H)⁺. ¹H NMR (400 MHz, DMSO) δ 10.02 (s, 1H), 8.80 (s, 1H), 8.56-8.45 (m, 2H), 8.14 (d, J=7.0 Hz, 1H), 7.89 (d, J=8.7 Hz, 1H), 7.79 (d, J=10.7 Hz, 1H), 7.59 (d, J=8.3 Hz, 2H), 7.43 (s, 1H), 7.35-7.21 (m, 3H), 6.94 (s, 1H), 6.53 (s, 1H), 6.01 (s, 1H), 5.60 (s, 2H), 5.44 (m, 5H), 5.20 (s, 2H), 4.92 (s, 2H), 4.62 (d, J=6.6 Hz, 2H), 4.37 (s, 1H), 4.27-4.17 (m, 2H), 4.01 (s, 2H), 3.65-3.30 (m, 17H), 3.36 (s, 2H), 3.05-2.97 (m, 4H), 2.45-2.34 (m, 5H), 2.25 (s, 3H), 2.20-1.40 (m, 16H), 0.90-0.80 (m, 9H) ppm. ¹⁹F NMR (376 MHz, DMSO_{d6}) δ −74, −111 ppm.

### LP1B synthesized from P1 with Fmoc-vcPAB and then reacted with intermediate Bc {4-[(2S)-5-(carbamoylamino)-2-[(2S)-2-[1-({[(4E)-cyclooct-4-en-1-yloxy]carbonyl}amino)-3,6,9,12-tetraoxapentadecan-15-amido]-3-methylbutanamido]pentanamido]phenyl}methyl N-({[({[(10S,23S)-10-ethyl-18-fluoro-10-hydroxy-19-methyl-5,9-dioxo-8-oxa-4,15-diazahexacyclo[14.7.1.0^{2,14}.0^{4,13}.0^{6,11}.0^{20,24}]tetracosa-1,6(11),12,14,16,18,20(24)-heptaen-23-yl]carbamoyl}methoxy)methyl]carbamoyl}methyl)carbamate (LP1B)

[chemical structure]

[0950] Following the similar procedure as LP1 except using MeTz-PEG4-acid (Bc) instead of Ba, linker-payload LP1B (20 mg, 55% yield) was obtained as a red solid. ESI m/z: 702.3 (M/2+H)⁺. ¹H NMR (400 MHz, DMSO_{d6}) δ 9.98 (s, 1H), 8.80 (d, J=6.6 Hz, 1H), 8.50 (d, J=9.0 Hz, 1H), 8.40 (d, J=8.9 Hz, 2H), 8.11 (d, J=7.5 Hz, 1H), 7.87 (d, J=8.7 Hz, 1H), 7.78 (d, J=11.1 Hz, 1H), 7.58 (d, J=8.5 Hz, 2H), 7.42 (t, J=5.7 Hz, 1H), 7.33-7.24 (m, 3H), 7.21 (t, J=7.1 Hz, 2H), 5.99 (br s, 1H), 5.60 (br s, 1H), 5.46-5.29 (m, 2H), 5.19 (s, 2H), 4.92 (s, 2H), 4.62 (d, J=6.4 Hz, 2H), 4.38 (d, J=5.1 Hz, 1H), 4.29-4.19 (m, 4H), 4.01 (br s, 2H), 3.83-3.76 (m, 3H), 3.63-3.54 (m, 6H), 3.52-3.46 (m, 8H), 3.25-3.13 (m, 2H), 3.08-2.80 (m, 5H), 2.41-2.33 (m, 5H), 2.18 (s, 2H), 1.91-1.71 (m, 4H), 1.64-1.50 (m, 3H), 1.50-1.20 (m, 4H), 0.88-0.80 (m, 9H) ppm. ¹⁹F NMR (376 MHz, DMSO_{d6}) δ −74, −111 ppm.

### Example 14. Exemplary Synthesis of Linker-payloads by route 5 (Scheme 4F)

### LP1 synthesized from PEG4-vcPAB-P1 with intermediate A {4-[(2S)-2-[(2S)-2-(1-amino-3,6,9,12-tetraoxapentadecan-15-amido)-3-methylbutanamido]-5-(carbamoylamino)pentanamido]phenyl}methyl N-({[({[(10S,23S)-10-ethyl-18-fluoro-10-hydroxy-19-methyl-5,9-dioxo-8-oxa-4,15-diazahexacyclo[14.7.1.0^{2,14}.0^{4,13}.0^{6,11}.0^{20,24}]tetracosa-1,6(11),12,14,16,18,20(24)-heptaen-23-yl]carbamoyl}methoxy)methyl]carbamoyl}methyl)carbamate (PEG4-vcPAB-P1)

[chemical structure]

[0952] To a solution of intermediate D-3 (85 mg, 0.10 mmol) in DMF (2 mL) were added DMAP (12 mg, 0.10 mmol), DIPEA (39 mg, 0.30 mmol) and bis(4-nitrophenyl) carbonate (91 mg, 0.30 mmol), and the reaction mixture was stirred at room temperature for an hour, which was monitored by LCMS. The resulting mixture was purified by reversed phase flash chromatography (0-60% acetonitrile in water) to give D-3-PNP as oil, which was dissolved in DMF (2 mL). To the solution were then added HOBt (6.8 mg, 50 μmol), DIPEA (39 mg, 0.30 mmol) and P1 (69 mg, 0.10 mmol, TFA salt), and the reaction mixture was stirred at room temperature for 2 hours, which was monitored by LCMS. The resulting mixture was directly purified by reversed phase flash chromatography (0-100% acetonitrile in aq. TFA (0.1%)) to give Fmoc-PEG4-vcPAB-P1 as a white solid, which was dissolved in DMF (1 mL). To the solution was added diethylamine (0.1 mL), and the mixture was stirred at room temperature for an hour until Fmoc was totally removed, which was monitored by LCMS. The resulting mixture was directly purified by reversed phase flash chromatography (0-100% acetonitrile in aq. TFA (0.01%)) to give PEG4-vcPAB-P1 (72 mg, 53% yield, TFA salt) as a light yellow solid. ESI m/z: 616.9 (M/2+H)⁺.

### {4-[(2S)-5-(carbamoylamino)-2-[(2S)-2-{1-[2-(cyclooct-2-yn-1-yloxy)acetamido]-3,6,9,12-tetraoxapentadecan-15-amido}-3-methylbutanamido]pentanamido]phenyl}methyl N-({[({[(10S,23S)-10-ethyl-18-fluoro-10-hydroxy-19-methyl-5,9-dioxo-8-oxa-4,15-diazahexacyclo[14.7.1.0^{2,14}.0^{4,13}.0^{6,11}.0^{20,24}]tetracosa-1,6(11),12,14,16,18,20(24)-heptaen-23-yl]carbamoyl}methoxy)methyl]carbamoyl}methyl)carbamate (LP1)

[chemical structure]

[0954] To a solution of PEG4-vcPAB-P1 (67 mg, 50 μmol) in DMF (1 mL) were added intermediate A (17 mg, 60 μmol) and DIPEA (19 mg, 0.15 mmol), and the reaction mixture was stirred at room temperature for an hour, which was monitored by LCMS. The reaction mixture was directly purified by prep-HPLC (5-95% acetonitrile in aq. TFA (0.1%)) to give LP1 (18 mg, 26% yield) as a white solid. ESI m/z: 699.0 (M/2+H)⁺.

### Example 15. Exemplary Synthesis of EvcPAB-Linker-payloads (Scheme 5A)

### LP5D

### (4S)-4-(1-amino-3,6,9,12-tetraoxapentadecan-15-amido)-4-{[(1S)-1-{[(1S)-4-(carbamoylamino)-1-{[4-({[(4-nitrophenoxy)carbonyl]oxy}methyl)phenyl]carbamoyl}butyl]carbamoyl}-2-methylpropyl]carbamoyl}butanoic acid (G-4)

[chemical structure]

[0956] To a solution of compound G-1 (0.30 g, 0.38 mmol) in dry DMF (4 mL) was added diethylamine (56 mg, 0.76 mmol), and the mixture was stirred at room temperature for 2 hours until Fmoc was totally removed, which was monitored by LCMS. The reaction mixture was purified by prep-HPLC to give a white solid (0.13 g, ESI m/z: 587.3 (M+Na)+), which was dissolved in dry DMF (3 mL). To the solution were added N-Boc-PEG4-acid (70 mg, 0.19 mmol), HATU (87 mg, 0.23 mmol) and DIPEA (99 mg, 0.23 mmol). The reaction mixture was stirred at room temperature for 2 hours, which was monitored by LCMS. The mixture was directly purified by prep-HPLC to give G-2 (0.15 g, 43% yield) as a white solid. ESI m/z: 913.3 (M+H)⁺.

[0957] To a solution of G-2 (0.14 g, 0.15 mmol) in DMF (1.5 mL) were added DIPEA (50 mg, 0.38 mmol) and bis(4-nitrophenyl) carbonate (70 mg, 0.23 mmol), and the reaction mixture was stirred at room temperature for 2 hours, which was monitored by LCMS. The mixture was separated by reversed phase flash chromatography (0-100% acetonitrile in aq. TFA (0.01%)) to give compound G-3 (0.19 g, 93% yield) as a white solid. ESI m/z: 1100 (M+Na)⁺.

[0958] To a solution of compound G-3 (0.18 g, 0.17 mmol) in acetonitrile (2.0 mL) was added HCl in ethyl acetate (4 M, 2 mL). The reaction mixture was stirred at room temperature for 3 hours. The mixture was purified by reversed phase flash chromatography (0-100% acetonitrile in aq. TFA (0.01%)) to give compound G-4 (0.10 g, 58% yield) as a white solid. ESI m/z: 943.5 (M+Na)⁺.

### (4S)-4-{[(1S)-1-{[(1S)-4-(carbamoylamino)-1-{[4-({[(4-nitrophenoxy)carbonyl]oxy}methyl)phenyl]carbamoyl}butyl]carbamoyl}-2-methylpropyl]carbamoyl}-4-{1-[2-(cyclooct-2-yn-1-yloxy)acetamido]-3,6,9,12-tetraoxapentadecan-15-amido}butanoic acid (Ga)

[chemical structure]

[0960] To a mixture of intermediate Aa (39 mg, 0.10 mmol) in DMF (1 mL) were added DIPEA (28 mg, 0.22 mmol) and a solution of compound G-4 (90 mg, 87 μmol) in DMF (1.5 mL). The reaction mixture was stirred at room temperature for an hour, which was monitored by LCMS. After the reaction completed, the mixture was immediately separated by prep-HPLC to give compound Ga (30 mg, 29% yield) as a white solid. ESI m/z: 1085 (M+H)+, 1107 (M+Na)⁺.

### (4S)-4-{[(1S)-1-{[(1S)-1-({4-[({[(5S)-5-amino-5-{[({[(10S,23S)-10-ethyl-18-fluoro-10-hydroxy-19-methyl-5,9-dioxo-8-oxa-4,15-diazahexacyclo[14.7.1.0^{2,14}.0^{4,13}.0^{6,11}.0^{20,24}]tetracosa-1,6(11),12,14,16,18,20(24)-heptaen-23-yl]carbamoyl}methoxy)methyl]carbamoyl}pentyl]carbamoyl}oxy)methyl]phenyl}carbamoyl)-4-(carbamoylamino)butyl]carbamoyl}-2-methylpropyl]carbamoyl}-4-{1-[2-(cyclooct-2-yn-1-yloxy)acetamido]-3,6,9,12-tetraoxapentadecan-15-amido}butanoic acid (LP5D)

[chemical structure]

[0962] Following the similar procedure as LP5 in Example 7 except using compound Ga instead of intermediate D, linker-payload LP5D (7 mg, 14% yield) was obtained as a light yellow solid. ESI m/z: 799 (M/2+H). ¹H NMR (400 MHz, DMSO_{d6}) δ 12.09 (br s, 1H), 10.02 (s, 1H), 9.29 (br s, 1H), 8.59 (d, J=8.4 Hz, 1H), 8.25-7.99 (m, 5H), 7.80 (d, J=10.9 Hz, 1H), 7.72 (d, J=8.9 Hz, 1H), 7.62-7.58 (m, 3H), 7.34 (s, 1H), 7.31-7.10 (m, 3H), 6.55 (s, 1H), 5.98 (m, 1H), 5.61 (br s, 1H), 5.42 (br s, 4H), 5.21 (s, 2H), 4.91 (s, 2H), 4.81-4.64 (m, 2H), 4.38-4.14 (m, 4H), 4.06 (s, 2H), 3.82-3.77 (m, 2H), 3.62-3.58 (m, 2H), 3.53-3.44 (m, 12H), 3.41 (m, 2H), 3.28-3.14 (m, 4H), 3.05-2.96 (m, 4H), 2.44-2.29 (m, 6H), 2.28-2.13 (m, 6H), 2.07 (br s, 1H), 1.98-1.83 (m, 5H), 1.80-1.65 (m, 6H), 1.61-1.53 (m, 3H), 1.44-1.37 (m, 5H), 1.32-1.22 (m, 3H), 0.91-0.77 (m, 9H) ppm. ¹⁹F NMR (376 MHz, DMSO_{d6}) δ −73, −111 ppm.

### Example 16. Synthesis of Branched-linker-payloads

[0963] The synthesis of branch linker L13aE and L15aE were reported in WO2022015656. Compounds L13bE and L15bE were synthesized as described below.

| | | | |
|---|---|---|---|
| L13aE | [chemical structure] | 2758875- 40-8 | WO2022015656 |
| L13bE | [chemical structure] | | |
| L15aE | [chemical structure] | 2758875- 37-3 | WO2022015656 |
| L15bE | [chemical structure] | | |

### 2,3,4,5,6-pentafluorophenyl 3-(2-{2-[4-(6-methyl-1,2,4,5-tetrazin-3-yl)phenyl]acetamido}-3-[3-oxo-3-(2,3,4,5,6-pentafluorophenoxy)propoxy]propoxy)propanoate (L13bE)

[chemical structure]

[0965] To a stirred mixture of compound AdE (0.28 g, 0.87 mmol) in DMF (10 ml-) were added commercial compound L13 (0.21 g, 0.87 mmol) and DIPEA (0.34 g, 2.6 mmol), and the reaction mixture was stirred at room temperature for an hour. Reaction was monitored by LCMS. The resulting mixture was directly separated by reversed phase flash chromatography (0-100% acetonitrile in aq. TFA (0.1%)) to give compound L13b (65 mg, 17% yield) as a red solid. ESI m/z 448 (M+H)⁺.

[0966] To a solution of compound L13b (65 mg, 0.15 mmol) in DCM (10 mL) were added pentafluorophenol (PFP) (54 mg, 0.29 mmol) and N,N′-diisopropylcarbodiimide (DIC) (37 mg, 0.29 mmol), and the mixture was stirred at room temperature for 2 hours. Reaction was monitored by LCMS. The resulting solution was concentrated in vacuo to give crude compound L13bE (65 mg, 57% yield) as a red solid, which was used for the next step without further purification. ESI m/z 780 (M+H)⁺.

### 2,3,4,5,6-pentafluorophenyl 2-{2-[4-(6-methyl-1,2,4,5-tetrazin-3-yl)phenyl]-N-[2-oxo-2-(2,3,4,5,6-pentafluorophenoxy)ethyl]acetamido}acetate (15bE)

[chemical structure]

[0968] Following the similar procedure of L13bE except using L15 instead of L13, compound L15bE (30 mg, 6% yield) was obtained as a red solid. ESI m/z 678 (M+H)⁺.

### Example 17. Synthesis of linker-payload LP13 and LP13C (Scheme 5B)

[0969] The synthesis of linker-payload LP13 is described in WO2022015656. linker-payload LP13 and LP13C were prepared as described below (FIG. 5).

### tert-butyl (4S)-4-amino-4-{[(1S)-1-{[(1S)-4-(carbamoylamino)-1-{[4-(hydroxymethyl)phenyl]carbamoyl}butyl]carbamoyl}-2-methylpropyl]carbamoyl}butanoate (13-1)

[chemical structure]

[0971] To a solution of Fmoc-Glu(OtBu)-OH (CAS: 71989-18-9, 1.6 g, 3.8 mmol) in DMF (10 mL) were added HATU (2.9 g, 7.7 mmol) and DIPEA (0.99 g, 7.7 mmol), and the mixture was stirred at room temperature for 15 minutes before the addition of vcPAB (CAS: 159857-79-1, 1.6 g, 4.2 mmol). The reaction mixture was stirred at room temperature for an hour, which was monitored by LCMS. The resulting mixture was separated by reversed phase flash chromatography (0-100% acetonitrile in aq. ammonium bicarbonate (10 mM)) to give Fmoc-13-1 (1.8 g, ESI m/z 787 (M+H)⁺) as a white solid, which was dissolved in DCM (10 mL). To the solution was added diethylamine (0.65 g, 8.9 mmol), and the reaction mixture was stirred at room temperature for 18 hours until Fmoc was totally removed according to LCMS. The volatiles were removed in vacuo and the residue was purified by reversed phase flash chromatography (10-40% acetonitrile in aq. TFA (0.01%)) to give compound 13-1 (1.0 g, 47% yield) as a white solid. ESI m/z 565 (M+H)⁺.

### tert-butyl (4S)-4-{[(1S)-1-{[(1S)-4-(carbamoylamino)-1-{[4-(hydroxymethyl)phenyl]carbamoyl}butyl]carbamoyl}-2-methylpropyl]carbamoyl}-4-(3-{2-[2-({[(9H-fluoren-9-yl)methoxy]carbonyl}amino)ethoxy]ethoxy}propanamido)butanoate (13-2)

[chemical structure]

[0973] To a solution of Fmoc-PEG₂-acid (0.42 g, 1.0 mmol) in DMF (5 mL) were added HATU (0.48 g, 1.3 mmol) and DIPEA (0.27 g, 2.1 mmol), and the reaction mixture was stirred at room temperature for 15 minutes before the addition of compound 13-1 (0.59 g, 1.0 mmol). The reaction mixture was stirred at room temperature for an hour, which was monitored by LCMS. The resulting mixture as directly separated by reversed phase flash chromatography (0-100% acetonitrile in aq. ammonium bicarbonate (10 mM)) to give compound 13-2 (0.73 g, 73% yield) as a white solid. ESI m/z 946 (M+H)⁺.

### (4S)-4-{[(1S)-1-{[(1S)-4-(carbamoylamino)-1-{[4-({[(4-nitrophenoxy)carbonyl]oxy}methyl)phenyl]carbamoyl}butyl]carbamoyl}-2-methylpropyl]carbamoyl}-4-(3-{2-[2-({[(9H-fluoren-9-yl)methoxy]carbonyl}amino)ethoxy]ethoxy}propanamido)butanoic acid (13-3)

[chemical structure]

[0975] To a solution of compound 13-2 (0.50 g, 0.53 mmol) in DMF (5 mL) were added DMAP (0.13 g, 1.1 mmol), DIPEA (0.68 g, 5.3 mmol), and bis(4-nitrophenyl) carbonate (1.6 g, 5.3 mmol), and the reaction mixture was stirred at room temperature for an hour, which was monitored by LCMS. The resulting mixture was directly separated by reversed phase flash chromatography (40-80% acetonitrile in water) to give a white solid (0.44 g, ESI m/z 1112 (M+H)⁺), which was dissolved in acetonitrile (4 mL). To the solution was added a solution of hydrochloride in ethyl acetate (4 N, 4 mL) at 0° C. The reaction mixture was stirred at 0° C. for 2 hours, which was monitored by LCMS. The volatiles were removed in vacuo at room temperature and the residue was purified by reversed phase flash chromatography (0-100% acetonitrile in aq. ammonium bicarbonate (10 mM)) to give compound 13-3 (0.20 g, 36% yield) as a light yellow solid. ESI m/z 1055 (M+H)⁺.

### (4S)-4-{3-[2-(2-aminoethoxy)ethoxy]propanamido}-4-{[(1S)-1-{[(1S)-4-(carbamoylamino)-1-{[4-({[({[({[(10S,23S)-10-ethyl-18-fluoro-10-hydroxy-19-methyl-5,9-dioxo-8-oxa-4,15-diazahexacyclo[14.7.1.0^{2,14}.0^{4,13}.0^{6,11}.0^{20,24}]tetracosa-1,6(11),12,14,16,18,20(24)-heptaen-23-yl]carbamoyl}methoxy)methyl]carbamoyl}methyl)carbamoyl]oxy}methyl)phenyl]carbamoyl}butyl]carbamoyl}-2-methylpropyl]carbamoyl}butanoic acid (13-4)

[chemical structure]

[0977] To a solution of compound 13-3 (0.11 g, 0.10 mmol) in DMF (2 mL) were added ProDXd (70 mg, 0.12 mmol) and DIPEA (26 mg, 0.20 mmol). The reaction mixture was stirred at room temperature for an hour, which was monitored by LCMS. The resulting mixture was directly separated by reversed phase flash chromatography (30-75% acetonitrile in water) to give Fmoc-13-4 (0.15 g, ESI m/z 749 (M/2+H)⁺) as a yellow solid, which was dissolved in DMF (2 mL). To the solution was added diethylamine (26 mg, 0.35 mmol), and the reaction mixture was stirred at room temperature for 2 hours, which was monitored by LCMS. The volatiles were removed in vacuo and the residual solution was separated by reversed phase flash chromatography (0-100% acetonitrile in aq. ammonium bicarbonate (10 mM)) to give compound 13-4 (85 mg, 67% yield from 13-2, 56% yield from ProDXd) as a white solid. ESI m/z 637 (M/2+H)⁺. (4S)-4-{[(1S)-1-{[(1S)-4-(carbamoylamino)-1-{[4-({[({[({[(10S,23S)-10-ethyl-18-fluoro-10-hydroxy-19-methyl-5,9-dioxo-8-oxa-4,15-diazahexacyclo[14.7.1.0^{2,14}.0^{4,13}.0^{6,11}.0^{20,24}]tetracosa-1,6(11),12,14,16,18,20(24)-heptaen-23-yl]carbamoyl}methoxy)methyl]carbamoyl}methyl)carbamoyl]oxy}methyl)phenyl]carbamoyl}butyl]carbamoyl}-2-methylpropyl]carbamoyl}-4-(3-{2-[2-(3-{3-[2-({2-[2-(2-{[(1S)-1-{[(1S)-1-{[(1S)-4-(carbamoylamino)-1-{[4-({[({[({[(10S,23S)-10-ethyl-18-fluoro-10-hydroxy-19-methyl-5,9-dioxo-8-oxa-4,15-diazahexacyclo[14.7.1.0²,4.0^{4,13}.0^{6,11}.0^{20,24}]tetracosa-1,6(11),12,14,16,18,20(24)-heptaen-23-yl]carbamoyl}methoxy)methyl]carbamoyl}methyl)carbamoyl]oxy}methyl)phenyl]carbamoyl}butyl]carbamoyl}-2-methylpropyl]carbamoyl}-3-carboxypropyl]carbamoyl}ethoxy)ethoxy]ethyl}carbamoyl)ethoxy]-2-[3-(2-{2-[2-(cyclooct-2-yn-1-yloxy)acetamido]ethoxy}ethoxy)propanamido]propoxy}propanamido)ethoxy]ethoxy}propanamido)butanoic acid (LP13)

[chemical structure]

[0978] To a solution of compound 13-4 (90 mg, 71 μmol) in DMF (2 mL) were added compound L13aE (24 mg, 27 μmol) and DIPEA (21 mg, 0.16 mmol), and the reaction mixture was stirred at room temperature for 2 hours, which was monitored by LCMS. The resulting mixture was separated by reversed phase flash chromatography (0-100% acetonitrile in aq. ammonium bicarbonate (10 mM)) to give LP13 (45 mg, 21% yield) as a white solid. ESI m/z 1024 (M/3+H)+. ¹H NMR (400 MHz, DMSO_{d6}) δ 10.04 (s, 2H), 8.80 (t, J=6.5 Hz, 2H), 8.51 (d, J=8.8 Hz, 2H), 8.19 (d, J=7.2 Hz, 2H), 8.10 (d, J=7.8 Hz, 2H), 7.93 (t, J=5.4 Hz, 2H), 7.76 (s, 1H), 7.78-7.73 (m, 4H), 7.65-7.55 (m, 5H), 7.42 (d, J=5.6 Hz, 2H), 7.31 (s, 2H), 7.27 (d, J=8.4 Hz, 4H), 6.54 (s, 2H), 6.01 (br s, 2H), 5.62-5.57 (m, 2H), 5.45-5.36 (m, 8H), 5.26-5.10 (m, 4H), 4.92 (s, 4H), 4.63 (d, J=6.5 Hz, 4H), 4.41-4.30 (m, 4H), 4.29-4.25 (m, 1H), 4.22-4.15 (m, 2H), 4.02 (s, 4H), 3.89-3.84 (m, 1H), 3.78-3.73 (m, 1H), 3.66-3.54 (m, 17H), 3.50-3.14 (m, 22H), 3.08-2.99 (m, 2H), 2.96-2.92 (m, 2H), 2.38 (s, 8H), 2.36-2.29 (m, 10H), 2.25-2.13 (m, 12H), 1.99-1.94 (m, 2H), 1.90-1.81 (m, 8H), 1.76-1.67 (m, 6H), 1.61-1.55 (m, 4H), 1.46-1.35 (m, 6H), 0.89-0.81 (m, 22H) ppm.

### LP13C

### (4S)-4-{[(1S)-1-{[(1S)-4-(carbamoylamino)-1-{[4-({[({[({[(10S,23S)-10-ethyl-18-fluoro-10-hydroxy-19-methyl-5,9-dioxo-8-oxa-4,15-diazahexacyclo[14.7.1.0^{2,14}.0^{4,13}.0^{6,11}.0^{20,24}]tetracosa-1,6(11),12,14,16,18,20(24)-heptaen-23-yl]carbamoyl}methoxy)methyl]carbamoyl}methyl)carbamoyl]oxy}methyl)phenyl]carbamoyl}butyl]carbamoyl}-2-methylpropyl]carbamoyl}-4-(3-{2-[2-(3-{3-[2-({2-[2-(2-{[(1S)-1-{[(1S)-1-{[(1S)-4-(carbamoylamino)-1-{[4-({[({[({[(10S,23S)-10-ethyl-18-fluoro-10-hydroxy-19-methyl-5,9-dioxo-8-oxa-4,15-diazahexacyclo[14.7.1.0^{2,14}.0^{4,13}.0^{6,11}.0^{20,24}]tetracosa-1,6(11),12,14,16,18,20(24)-heptaen-23-yl]carbamoyl}methoxy)methyl]carbamoyl}methyl)carbamoyl]oxy}methyl)phenyl]carbamoyl}butyl]carbamoyl}-2-methylpropyl]carbamoyl}-3-carboxypropyl]carbamoyl}ethoxy)ethoxy]ethyl}carbamoyl)ethoxy]-2-{2-[4-(6-methyl-1,2,4,5-tetrazin-3-yl)phenyl]acetamido}propoxy}propanamido)ethoxy]ethoxy}propanamido)butanoic acid (LP13C)

[chemical structure]

[0980] Following the similar procedure as LP13 except starting from L13bE (65 mg, 83 μmol) instead of L13aE, linker-payload LP13C (99 mg, 40% yield) was obtained as a red solid. ESI m/z 1479 (M/2+H)⁺. ¹H NMR (400 MHz, DMSO_{d6}) δ 10.04 (s, 2H), 8.80 (t, J=6.3 Hz, 2H), 8.50 (d, J=8.6 Hz, 2H), 8.39 (d, J=8.2 Hz, 2H), 8.20-8.12 (m, 3H), 8.08 (d, J=7.8 Hz, 2H), 7.94 (t, J=5.5 Hz, 2H), 7.77 (t, J=10.1 Hz, 4H), 7.61-7.49 (m, 6H), 7.43 (t, J=5.9 Hz, 2H), 7.32-7.21 (m, 6H), 6.53 (s, 2H), 5.98 (t, J=5.5 Hz, 2H), 5.63-5.56 (m, 2H), 5.48-5.35 (m, 8H), 5.19 (s, 4H), 4.92 (s, 4H), 4.62 (d, J=6.5 Hz, 4H), 4.41-4.30 (m, 4H), 4.21-4.16 (m, 2H), 4.01 (s, 4H), 3.98-3.92 (m, 1H), 3.66-3.52 (m, 16H), 3.47 (s, 12H), 3.21-3.17 (m, 6H), 2.98 (s, 3H), 2.26-2.14 (m, 9H), 2.08 (s, 9H), 2.03-1.79 (m, 12H), 1.77-1.52 (m, 9H), 1.50-1.34 (m, 6H), 1.24 (s, 6H), 0.88-0.80 (m, 18H) ppm.

### Example 18. Synthesis of LP15 and LP15C

[0981] LP15 was prepared as shown in Scheme 5C.

### (2S)-2-[2-(2-Aminoacetamido)acetamido]-N-({[({[(10S,23S)-10-ethyl-18-fluoro-10-hydroxy-19-methyl-5,9-dioxo-8-oxa-4,15-diazahexacyclo[14.7.1.02,14.04,13.06,11.020,24]tetracosa-1,6(11),12,14,16,18,20(24)-heptaen-23-yl]carbamoyl}methoxy)methyl]carbamoyl}methyl)-3-phenylpropanamide (15-1)

[chemical structure]

[0983] To a yellow solution of Fmoc-Gly-Gly-Phe-OH (CAS: 160036-44-2, 50 mg, 0.10 mmol) in dry DMF (1 mL) was added HATU (46 mg, 0.12 mmol), and the mixture was stirred at room temperature for 5 minutes until the mixture turned clear. To the mixture was then added a solution of ProDXd (TFA salt, 69 mg, 0.10 mmol) and DIPEA (39 mg, 0.30 mmol) in dry DMF (1 mL). The reaction mixture was stirred at room temperature for 2 hours, which was monitored by LCMS. To the resulting solution was added diethylamine (0.2 mL), and the reaction mixture was stirred at room temperature for half an hour, which was monitored by LCMS. The resulting mixture was separated by reversed phase flash chromatography (0-50% acetonitrile in aq. TFA (0.01%)) to give compound 15-1 (30 mg, 36% yield) as a white solid. ESI m/z: 841 (M+H)⁺. ¹H NMR (400 MHz, DMSO_{d6}) δ 8.70 (t, J=5.2 Hz, 1H), 8.54 (dd, J=6.8, 2.4 Hz, 1H), 8.49 (t, J=4.4 Hz, 1H), 8.39 (t, J=4.4 Hz, 1H), 8.35-8.31 (m, 1H), 8.28 (br s, 2H), 7.79 (d, J=8.8 Hz, 1H), 7.32 (s, 1H), 7.27-7.20 (m, 4H), 7.19-7.16 (m, 1H), 6.54 (s, 1H), 5.62-5.58 (m, 1H), 5.42 (s, 2H), 5.21 (s, 2H), 4.65 (d, J=5.2 Hz, 2H), 4.57-4.50 (m, 1H), 4.03 (s, 2H), 3.89-3.84 (m, 1H), 3.79-3.68 (m, 3H), 3.58 (s, 2H), 3.25-3.11 (m, 2H), 3.06-3.01 (m, 1H), 2.78-2.72 (m, 1H), 2.39 (s, 3H), 2.23-2.13 (m, 2H), 1.92-1.81 (m, 2H), 1.28-1.24 (m, 1H), 0.87 (t, J=5.6 Hz, 3H) ppm.

### (2S)-2-[2-(2-{3-[2-(2-Aminoethoxy)ethoxy]propanamido}acetamido)acetamido]-N-({[({[(10S,23S)-10-ethyl-18-fluoro-10-hydroxy-19-methyl-5,9-dioxo-8-oxa-4,15-diazahexacyclo[14.7.1.0^{2,14}.0^{4,13}.0^{6,11}.0^{20,24}]tetracosa-1,6(11),12,14,16,18,20(24)-heptaen-23-yl]carbamoyl}methoxy)methyl]carbamoyl}methyl)-3-phenylpropanamide (15-2)

[chemical structure]

[0985] To a solution of compound 15-1 (58 mg, 69 μmol) in DMF (5 mL) were successively added compound Fmoc-PEG₂-acid (CAS: 872679-70-4, 28 mg, 69 μmol), DIPEA (18 mg, 0.14 mmol) and HATU (40 mg, 0.10 mmol), and the reaction mixture was stirred at room temperature for 4 hours, which was monitored by LCMS. The resulting mixture was separated by prep-HPLC (0-100% acetonitrile in aq. TFA (0.05%)) to give a white solid (54 mg, ESI m/z: 729.3 (M−M_{Dxd}+H)+), which was dissolved in DMF (5 mL). To the solution was added diethylamine (16 mg, 0.22 mmol), and the mixture was stirred at room temperature for 2 hours until Fmoc was totally removed according to LCMS. The resulting mixture was directly purified by reversed phase flash chromatography (0-100% acetonitrile in aq. TFA (0.01%)) to give compound 15-2 (40 mg, 57% yield) as a white solid. ESI m/z: 1001 (M+H)+, 501 (M/2+H)⁺.

### 1-[2-(Cyclooct-2-yn-1-yloxy)acetamido]-N-(2-{2-[2-({[({[(1S)-1-[({[({[(10S,23S)-10-ethyl-18-fluoro-10-hydroxy-19-methyl-5,9-dioxo-8-oxa-4,15-diazahexacyclo[14.7.1.02,14.04,13.06,11.020,24]tetracosa-1,6(11),12,14,16,18,20(24)-heptaen-23-yl]carbamoyl}methoxy)methyl]carbamoyl}methyl)carbamoyl]-2-phenylethyl]carbamoyl}methyl)carbamoyl]methyl}carbamoyl)ethoxy]ethoxy}ethyl)-12-{[(2-{2-[2-({[({[(1S)-1-[({[({[(10S,23S)-10-ethyl-18-fluoro-10-hydroxy-19-methyl-5,9-dioxo-8-oxa-4,15-diazahexacyclo[14.7.1.02,14.04,13.06,11.020,24]tetracosa-1,6(11),12,14,16,18,20(24)-heptaen-23-yl]carbamoyl}methoxy)methyl]carbamoyl}methyl)carbamoyl]-2-phenylethyl]carbamoyl}methyl)carbamoyl]methyl}carbamoyl)ethoxy]ethoxy}ethyl)carbamoyl]methyl}-3,6,9-trioxa-12-azatetradecan-14-amide (LP15)

[chemical structure]

[0987] To a mixture of compound 15-2 (40 mg, 40 μmol) in DMF (5 mL) were added compound L15aE (16 mg, 20 μmol) and DIPEA (8.0 mg, 62 μmol), and the reaction mixture was stirred at room temperature for an hour, which was monitored by LCMS. the resulting mixture was directly separated by reversed phase flash chromatography (0-100% acetonitrile in aq. TFA (0.01%)) to give linker-payload LP15 (12 mg, 24% yield) as a white solid. ESI m/z: 813 (M/3+H)+. ¹H NMR (400 MHz, DMSO_{d6}) δ 8.64 (t, J=6.6 Hz, 2H), 8.52 (d, J=8.7 Hz, 2H), 8.31 (t, J=5.9 Hz, 2H), 8.19-8.09 (m, 4H), 8.05-7.98 (m, 3H), 7.77 (d, J=10.9 Hz, 2H), 7.65-7.56 (m, 2H), 7.31 (s, 2H), 7.29-7.12 (m, 8H), 6.53 (s, 2H), 5.65-5.56 (m, 3H), 5.42 (s, 3H), 5.20-5.15 (m, 3H), 4.70-4.60 (m, 3H), 4.50-4.44 (m, 2H), 4.30-4.22 (m, 2H), 4.02 (s, 3H), 3.86 (d, J=14.8 Hz, 2H), 3.78-3.66 (m, 9H), 3.63-3.55 (m, 6H), 3.53-3.40 (m, 27H), 3.27-3.19 (m, 6H), 3.15 (s, 4H), 3.09-3.00 (m, 2H), 2.81-2.72 (m, 2H), 2.70-2.63 (m, 2H), 2.42-2.32 (m, 8H), 2.25-2.11 (m, 6H), 2.09-1.97 (m, 3H), 1.94-1.68 (m, 9H), 1.63-1.51 (m, 3H), 1.43-1.34 (m, 2H), 1.29-1.20 (m, 3H), 0.87 (t, J=7.3 Hz, 6H) ppm. ¹⁹F NMR (376 MHz, DMSO_{d6}) 5-111.24 ppm. (no TFA signal).

### LP15C

### (2S)-N-({[({[(10S,23S)-10-ethyl-18-fluoro-10-hydroxy-19-methyl-5,9-dioxo-8-oxa-4,15-diazahexacyclo[14.7.1.0²,4.0^{4,13}.0^{6,11}.0^{20,24}]tetracosa-1,6(11),12,14,16,18,20(24)-heptaen-23-yl]carbamoyl}methoxy)methyl]carbamoyl}methyl)-2-(2-{2-[3-(2-{2-[2-(N-{[(2-{2-[2-({[({[(1S)-1-[({[({[(10S,23S)-10-ethyl-18-fluoro-10-hydroxy-19-methyl-5,9-dioxo-8-oxa-4,15-diazahexacyclo[14.7.1.0²,4.0^{4,13}.0^{6,11}.0^{20,24}]tetracosa-1,6(11),12,14,16,18,20(24)-heptaen-23-yl]carbamoyl}methoxy)methyl]carbamoyl}methyl)carbamoyl]-2-phenylethyl]carbamoyl}methyl)carbamoyl]methyl}carbamoyl)ethoxy]ethoxy}ethyl)carbamoyl]methyl}-2-[4-(6-methyl-1,2,4,5-tetrazin-3-yl)phenyl]acetamido)acetamido]ethoxy}ethoxy)propanamido]acetamido}acetamido)-3-phenylpropanamide (LP15C)

[chemical structure]

[0989] Following the similar procedures as LP15 except starting from L15bE (16 mg, 21 μmol) instead of L15aE, linker-payload LP15C (8 mg, 17% yield) was obtained as a red solid. ESI m/z 770 (M/3+H)+.

### Example 19. Synthesis of linker-DXd

[0990] LP16 was prepared as shown in Scheme 5D.

### (2S)-2-[(2S)-2-amino-3-methylbutanamido]-5-(carbamoylamino)-N-[4-({[({[(10S,23S)-10-ethyl-18-fluoro-10-hydroxy-19-methyl-5,9-dioxo-8-oxa-4,15-diazahexacyclo[14.7.1.0²,4.0^{4,13}.0^{6,11}.0^{20,24}]tetracosa-1,6(11),12,14,16,18,20(24)-heptaen-23-yl]carbamoyl}methoxy)carbonyl]oxy}methyl)phenyl]pentanamide (16-2)

[chemical structure]

[0992] To a solution of DXd (100 mg, 0.20 mmol) in THF (5 mL) were added bis(4-nitrophenyl) carbonate (0.14 g, 0.46 mmol) and DIPEA (0.12 g, 0.92 mmol) successively at room temperature, and the reaction mixture was then stirred at this temperature for 16 hours. Most of DXd was consumed according to LCMS. The volatiles were then removed and the residue was purified by silica gel column chromatography (5-90% ethyl acetate in petroleum ether) to give activated ester 16-1 (80 g, ESI m/z: 659 (M+H)⁺) as a light yellow solid, which was dissolved in dry DMF (4 mL). To the DMF solution were added Boc-vc-PAB-OH (100 mg, 0.21 mmol), DMAP (40 mg, 0.32 mmol), and pyridine (40 mg, 0.51 mmol), successively. The mixture was stirred at room temperature for 16 hours. The reaction mixture was directly purified by reversed phase flash chromatography (5-95% acetonitrile in water) to give Boc-16-2 (70 mg, ESI m/z: 1020 (M+Na)+) as a white solid, which was dissolved in DCM (10 mL). To the DCM solution was added TFA (1 mL) dropwise at 0° C. After stirred at room temperature for 1.5 hours until the Boc was totally removed, which was monitored by LCMS, the resulting mixture was concentrated in vacuo to give crude title product 16-2 (26 mg, 13% yield from DXd, TFA salt) as light yellow solid. ESI m/z: 899 (M+H)⁺.

### N-[(1S)-1-{[(1S)-4-(carbamoylamino)-1-{[4-({[({[(10S,23S)-10-ethyl-18-fluoro-10-hydroxy-19-methyl-5,9-dioxo-8-oxa-4,15-diazahexacyclo[14.7.1.0^{2,14}.0^{4,13}.0^{6,11}.0^{20,24}]tetracosa-1,6(11),12,14,16,18,20(24)-heptaen-23-yl]carbamoyl}methoxy)carbonyl]oxy}methyl)phenyl]carbamoyl}butyl]carbamoyl}-2-methylpropyl]-1-[2-(cyclooct-2-yn-1-yloxy)acetamido]-3,6,9,12-tetraoxapentadecan-15-amide (LP16)

[chemical structure]

[0994] To a solution of compound 16-2 (25 mg, 25 μmol) in dry DMF (1.5 mL) were added compound Ba (14 mg, 27 μmol) and DIPEA (14 mg, 0.11 mmol) successively, and the reaction mixture was stirred at room temperature for an hour, which was monitored by LCMS. The resulting mixture was directly separated by prep-HPLC (5-95% acetonitrile in aq. formic acid (0.05%)) to give linker-payload LP16 (3 mg, 9% yield) as a white solid. ESI m/z 656 (M/2+H)⁺.

[0995] LP17 was prepared as shown in Scheme 5E.

### 2-({[(4-azidophenyl)methoxy]carbonyl}amino)acetic acid (17-1)

[chemical structure]

[0997] To a solution of 4-aminobenzyl alcohol (10 g, 81 mmol) and azido(trimethyl)silane (11 g, 97 mmol, 13 mL) in acetonitrile (600 mL) was added tert-butyl nitrite (13 g, 0.12 mol, 15 mL) dropwise at 0° C. The mixture was stirred at room temperature for 2 hours before the addition of a solution of bis(4-nitrophenyl) carbonate (32 g, 0.11 mol) and DIPEA (21 g, 0.16 mol, 28 mL) in THF (300 mL), and the mixture was stirred at room temperature for 12 hours which was monitored by TLC (25% ethyl acetate in petroleum ether). The volatiles were removed in vacuo and the residue was dissolved in acetonitrile (500 mL). To the solution were added glycine (15 g, 0.20 mol) and aq. sodium bicarbonate (0.8 M, 250 mL, 0.2 mol) dropwise, and the mixture was stirred at room temperature for 16 hours, which was monitored by TLC (25% ethyl acetate in petroleum ether). The resulting mixture was washed with ethyl acetate (150 mL×6). And the aqueous solution was acidified with conc. HCl to pH 2-3 and was then extracted with ethyl acetate (150 mL×3). The combined organic solution was dried over anhydrous sodium sulfate and concentrated in vacuo to give 17-1 (13 g, 61% yield) as a brown solid, which was used in the next step without further purification. ¹H NMR (400 MHz, MeODd₄) δ 7.46-7.34 (m, 2H), 7.12-6.97 (m, 2H), 5.08 (s, 2H), 3.83 (s, 2H) ppm.

### ({[(4-azidophenyl)methoxy]carbonyl}amino)methyl acetate (17-2)

[chemical structure]

[0999] To a solution of compound 17-1 (13 g, 51 mmol) in THF (150 mL) lead acetate (45 g, 0.10 mol) and copper diacetate (0.93 g, 5.1 mmol) were added. The reaction mixture was stirred at 40° C. for an hour. The reaction was monitored by TLC (25% ethyl acetate in petroleum ether). The reaction was quenched with water (200 mL) and extracted with ethyl acetate (200 mL×2). The combined organic solution was washed with brine (150 mL×2), dried over anhydrous sodium sulfate, and concentrated in vacuo. The residue was purified by silica gel flash chromatography (0-25% ethyl acetate in petroleum ether) to give compound 17-2 (7.8 g, 55% yield) as yellow oil. ¹H NMR (400 MHz, CDCl₃) δ 7.36 (br d, J=8.2 Hz, 2H), 7.03 (d, J=8.4 Hz, 2H), 5.93 (br s, 1H), 5.21 (br d, J=7.5 Hz, 2H), 5.11 (s, 2H), 2.07 (s, 3H) ppm.

### 2-[({[(4-azidophenyl)methoxy]carbonyl}amino)methoxy]acetic acid (17-3)

[chemical structure]

[1001] To a solution of 17-2 (0.20 g, 0.76 mmol) in DCM (3 mL) were added PPTS (38 mg, 0.15 mmol) and hydroxyacetic acid (0.17 g, 2.3 mmol), and the reaction mixture was stirred in a sealed tube at 50° C. for 16 hours, which was monitored by LCMS. The resulting mixture was cooled and the volatiles were removed in vacuo. The residue was purified by prep-HPLC (0-100% acetonitrile in aq. TFA (0.01%)) to give compound 17-3 (0.10 g, 47% yield) as a yellow solid. ESI m/z: 303 (M+Na)⁺.

### {4-[(2S)-2-[(2S)-2-amino-3-methylbutanamido]propanamido]phenyl}methyl N-[({[(10S,23S)-10-ethyl-18-fluoro-10-hydroxy-19-methyl-5,9-dioxo-8-oxa-4,15-diazahexacyclo[14.7.1.0^{2,14}.0^{4,13}.0^{6,11}.0^{20,24}]tetracosa-1,6(11),12,14,16,18,20(24)-heptaen-23-yl]carbamoyl}methoxy)methyl]carbamate (17-4)

[chemical structure]

[1003] To a yellow solution of compound 17-3 (50 mg, 0.13 mmol) and DIPEA (49 mg, 0.38 mmol) in dry DMF (1.5 mL) was added HATU (59 mg, 0.15 mmol), and the mixture was stirred at room temperature for half an hour before the addition of exatecan (60 mg, 0.11 mmol). The reaction mixture was stirred at room temperature for 2 hours, which was monitored by LCMS. The resulting mixture was directly separated by prep-HPLC (5-95% acetonitrile in aq. TFA (0.01%)) to give compound 17-3b (58 mg, 65% yield) as a pale-yellow solid. ESI m/z: 698 (M+H)+.

[1004] To a 25 mL vial, charged with a stir bar and THF (3 mL), were added 17-3b (42 mg, 52 μmol), 4A molecular sieves (0.50 g), and then trimethylphosphine (0.16 mL, 0.16 mmol). The reaction mixture was stirred for 5 minutes before the addition of Fmoc-Val-Ala-OPFP (33 mg, 57 μmol). The reaction mixture was stirred at room temperature under nitrogen protection for half an hour, which was monitored by LCMS. The resulting mixture was directly separated by prep-HPLC (5-95% acetonitrile in aq. TFA (0.01%)) to give Fmoc-17-4 (53 mg, TFA salt) as a light-yellow solid, which was dissolved in dry DMF (1 mL). To the solution was added diethylamine (0.1 mL). The reaction mixture was stirred at room temperature for an hour until Fmoc was totally removed according to LCMS. The resulting solution was directly separated by prep-HPLC (5-95% acetonitrile in aq. TFA (0.01%)) to give compound 17-4 (28 mg, 57% yield, TFA salt) as a light-yellow solid. ESI m/z: 422 (M/2+H)⁺.

[1005] NMR for Fmoc-17-4: ¹H NMR (400 MHz, DMSO_{d6}) δ 10.03 (s, 1H), 8.48-8.29 (m, 1H), 8.26-8.11 (m, 1H), 7.89 (d, J=7.5 Hz, 2H), 7.79-7.72 (m, 3H), 7.70-7.52 (m, 2H), 7.44-7.41 (m, 3H), 7.34-7.25 (m, 3H), 7.20-7.17 (m, 2H), 6.54 (d, J=9.0 Hz, 1H), 5.59 (s, 2H), 5.42 (s, 2H), 5.21 (s, 1H), 4.87 (s, 1H), 4.54 (d, J=6.5 Hz, 2H), 4.41-4.32 (m, 1H), 4.35-4.17 (m, 3H), 4.00 (s, 1H), 3.98-3.83 (m, 1H), 3.15 (s, 2H), 2.38 (s, 3H), 2.18-2.11 (m, 3H), 2.09-1.95 (m, 2H), 1.93-1.71 (m, 2H), 1.30-1.14 (m, 6H), 0.89-0.77 (m, 9H) ppm. ¹⁹F NMR (376 MHz, DMSO_{d6}) δ −73.45, −111.33 ppm.

[1006] NMR for 17-4: ¹H NMR (400 MHz, DMSO_{d6}) δ 10.20 (br, 1H), 8.84-8.67 (m, 1H), 8.46 (br s, 1H), 8.21 (br s, 2H), 8.06 (s, 2H), 7.80 (d, J=10.5 Hz, 1H), 7.65-7.50 (m, 2H), 7.31 (s, 1H), 7.23 (t, J=8.2 Hz, 1H), 6.53 (s, 1H), 5.60 (s, 1H), 5.42 (s, 2H), 5.22 (s, 1H), 4.88 (d, J=5.8 Hz, 2H), 4.60-4.45 (m, 3H), 4.00 (s, 1H), 3.61 (br s, 1H), 3.17 (br s, 1H), 2.93-2.90 (m, 2H), 2.39 (s, 3H), 2.33-2.06 (m, 2H), 1.93-1.76 (m, 2H), 1.34 (t, J=7.4 Hz, 3H), 1.16 (t, J=7.3 Hz, 3H), 0.97-0.93 (m, 6H), 0.85 (t, J=7.4 Hz, 3H) ppm. ¹⁹F NMR (376 MHz, DMSO_{d6}) δ −73.44, −111.33 ppm.

### {4-[(2S)-2-[(2S)-2-{1-[2-(cyclooct-2-yn-1-yloxy)acetamido]-3,6,9,12-tetraoxapentadecan-15-amido}-3-methylbutanamido]propanamido]phenyl}methyl N-[({[(10S,23S)-10-ethyl-18-fluoro-10-hydroxy-19-methyl-5,9-dioxo-8-oxa-4,15-diazahexacyclo[14.7.1.0^{2,14}.0^{4,13}.0^{6,11}.0^{20,24}]tetracosa-1,6(11),12,14,16,18,20(24)-heptaen-23-yl]carbamoyl}methoxy)methyl]carbamate (LP17)

[chemical structure]

[1008] To a yellow solution of compound Ba (14 mg, 27 μmol) in dry DMF (1.5 mL) were added DIPEA (14 mg, 0.11 mmol) and compound 17-4 (23 mg, 24 μmol), and the reaction mixture was stirred at room temperature for an hour, which was monitored by LCMS. The resulting mixture was directly separated by prep-HPLC (5-95% acetonitrile in aq. formic acid (0.1%)) to give linker-payload LP17 (9.0 mg, 26% yield) as a white solid. ESI m/z: 1253 (M+H)⁺. ¹H NMR (400 MHz, DMSO_{d6}) δ 9.96 (s, 1H), 8.45 (m, 1H), 8.21 (m, 1H), 7.89 (d, J=8.6 Hz, 1H), 7.79 (d, J=10.9 Hz, 1H), 7.66-7.52 (m, 3H), 7.30 (s, 1H), 7.25-7.19 (m, 2H), 6.53 (s, 1H), 5.59 (s, 1H), 5.42 (s, 2H), 5.22 (s, 2H), 4.86 (s, 2H), 4.54 (d, J=6.7 Hz, 2H), 4.45-4.30 (m, 1H), 4.29-4.08 (m, 2H), 4.00 (s, 2H), 3.87 (d, J=14.8 Hz, 1H), 3.75 (d, J=14.7 Hz, 1H), 3.58 (d, J=6.2 Hz, 2H), 3.51-3.45 (m, 12H), 3.44-3.40 (m, 2H), 3.29-3.21 (m, 2H), 3.16 (br s, 2H), 2.45-2.36 (m, 5H), 2.24-2.02 (m, 5H), 2.02-1.70 (m, 7H), 1.61-1.52 (m, 2H), 1.44-1.22 (m, 5H), 0.92-0.77 (m, 9H) ppm. ¹⁹F NMR (376 MHz, DMSO_{d6}) δ −111.33 ppm.

### Synthesis of Intermediates

### Example 20. Synthesis of intermediate A (Scheme 6) 8,8-dibromobicyclo[5.1.0]octane (A-2)

[chemical structure]

[1010] To a stirred hexane (12 mL) was added potassium tert-butoxide (2.3 kg, 21 mol) in batches under nitrogen atmosphere. The mixture was stirred and cooled to −10° C. To the cooled and stirred mixture was added cycloheptene (A-1) (0.80 kg, 8.3 mol, 0.96 L) dropwise during an hour. The resulting suspension was stirred at −10° C. to −5° C. and to the suspension was added a solution of bromoform (3.2 kg, 13 mol, 1.1 L) in hexane (4.0 L) over 1.5 hours, maintaining the temperature between −10° C. to −5° C. The resulting suspension was then allowed to warm to 25° C. and stirred at this temperature for 16 hours until most of A-1 (>90%) was consumed, which was monitored by TLC (eluting with petroleum ether, PMA, R_{f}=0.8). The reaction mixture was quenched by cold water at 20-25° C. and cold aq. hydrochloride (1.0 M, 8.0 L) below 25° C. The resulting biphasic mixture was diluted with hexane (2.4 L) and separated. The aqueous layer was extracted with hexane (2.4 L×2) and the combined organic solution was dried over anhydrous sodium sulfate and concentrated in vacuo to give compound A-2 (1.8 kg, crude, containing 2.4% of A-1) as black oil, which was used for the next step without further purification. ¹H NMR (400 MHz, CDCl₃) δ 2.37-2.20 (m, 2H), 1.95-1.79 (m, 3H), 1.77-1.66 (m, 2H), 1.41-1.31 (m, 2H), 1.25-1.13 (m, 3H) ppm. Alternative ¹H NMR (400 MHz, CDCl₃): 2.19-2.33 (m, 2H, H-1, H-7), 1.77-1.94 (m, 3H), 1.63-1.76 (m, 2H), 1.31-1.40 (m, 2H), 1.11-1.24 (m, 3H) ppm.

| | Raw material | | | | | | | | | |
|---|---|---|---|---|---|---|---|---|---|---|
| | (Equivalent/Volume) | | | Solvent | Temp. | Time | Product A-2 | | | Analytical data |
| # | A-1 | tBuOK | bromoform | hexane | (° C.) | h | Amount | Yield | purity | TLC |
| 1 | 50.0 g | 145 g | 68 mL | 1000 mL | −10~25 | 16 | 0.11 kg | 79% | crude | R_{f} = 0.8 |
| | (1.00 eq.) | (2.5 eq.) | (1.5 eq) | (20 Vol.) | | | | | | (Eluting with petroleum |
| | | | | | | | | | | ether, PMA) |
| 2 | 100.0 g*2 | 290 g | 136 mL | 2000 mL | −10~25 | 16 | 0.45 kg | 81% | crude | R_{f} = 0.8 |
| | (1.00 eq.) | (2.5 eq.) | (1.5 eq) | (20 Vol.) | | | | | | (Eluting with petroleum |
| | | | | | | | | | | ether, PMA) |
| 3 | 125 g*2 | 362 g | 170 mL | 2500 mL | −10~25 | 16 | 0.56 kg | 80% | crude | R_{f} = 0.8 |
| | (1.00 eq.) | (2.5 eq) | (1.5 eq) | (20 Vol.) | | | | | | (Eluting with petroleum |
| | | | | | | | | | | ether, PMA) |
| 4 | 800 g | 2.32 kg | 1.09 L | 2500 mL | −10~25 | 16 | 1.8 kg | 81% | crude | R_{f} = 0.8 |
| | (1.00 eq.) | (2.5 eq) | (1.5 eq) | (20 Vol.) | | | | | | (Eluting with petroleum |
| | | | | | | | | | | ether, PMA) |

### methyl 2-{[(2Z)-2-bromocyclooct-2-en-1-yl]oxy}acetate (A-3)

[chemical structure]

[1012] To a solution of compound A-2 (1.8 kg, 6.7 mol) in DCM (3.6 L) was added methyl glycolate (5.0 L, 65 mol) at 25° C. and the reactor was protected from light using aluminium foil. To the reaction mixture was added silver trifluoromethanesulfonate (3.5 kg, 13 mol) in one portion, and the mixture was stirred at 25° C. for an hour, which was monitored by TLC (eluting with petroleum ether, PMA, R_{f}=0.8 for A-2 consumed, R_{f}=0.15 for A-3 formed). The resulting mixture was quenched with sat. aq. sodium bicarbonate (5.0 L) and brine (2.5 L). The silver salts precipitated and was filtered off. The filter cake was washed with MTBE (3.0 L) and the filtrate was diluted with MTBE (3.0 L). The organic layer was washed with water (2.0 L×2), dried over anhydrous sodium sulfate and concentrated in vacuo to give crude A-3 (1.8 kg, crude, 97% yield) as black oil, which was used for the next step without further purification. ¹H NMR (400 MHz, CDCl₃) δ 6.22 (dd, J=11.63, 4.13 Hz, 1H), 4.24 (d, J=16.51 Hz, 1H), 4.16-4.08 (m, 1H), 3.98 (d, J=16.51 Hz, 1H), 3.79-3.72 (m, 3H), 2.84-2.65 (m, 1H), 2.35-2.24 (m, 1H), 2.14-1.86 (m, 4H), 1.77-1.76 (m, 1H), 1.55-1.42 (m, 1H), 1.35-1.24 (m, 1H), 0.88-0.71 (m, 1H) ppm. Alternative ¹H NMR (400 MHz, CDCl₃) δ 6.19 (dd, J=11.6 Hz, 4.1 Hz, 1H, H-2), 4.19 (d, J=16.4 Hz, 1H, H-9a), 4.06-4.12 (m, 1H, H-8), 3.94 (d, J=16.5 Hz, 1H, H-9b), 3.74 (s, 3H, H-11), 2.69 (qd, J=11.8, 5.4 Hz, 1H, H-3a), 2.20-2.32 (m, 1H, H-3b), 1.18-2.10 (m, 7H, H-4, H-5, H-6a, H-7), 0.70-0.88 (m, 1H, H-6b) ppm.

| | Raw material | | | | | | | | |
|---|---|---|---|---|---|---|---|---|---|
| | (Equivalent/Volume) | | | | | | | | |
| | | | Methyl | Solvent | Temp. | Time | Product A-3 | | Analytical data |
| # | A-2 | AgOTf | glycolate | DCM | ° C. | h | Amount | purity | TLC |
| 1 | 0.10 kg | 0.19 kg | 0.29 L | 0.20 L | 25 | 1 | 98 g | crude | R_{f} = 0.43 |
| | | | | | | | | | (petroleum ether/ethyl acetate, |
| | | | | | | | | | v/v = 5, PMA) |
| 2 | 0.45 kg | 0.86 kg | 1.3 L | 0.90 L | 25 | 1 | 0.45 kg | crude | R_{f} = 0.43 |
| | | | | | | | | | (petroleum ether/ethyl acetate, |
| | | | | | | | | | v/v = 5, PMA) |
| 3 | 0.56 kg | 1.1 kg | 1.6 L | 1.2 L | 25 | 1 | 0.55 kg | crude | R_{f} = 0.43 |
| | | | | | | | | | (petroleum ether/ethyl acetate, |
| | | | | | | | | | v/v = 5, PMA) |
| 4 | 1.8 kg | 3.4 kg | 5.1 L | 3.6 L | 25 | 1 | 1.8 kg | crude | R_{f} = 0.43 |
| | | | | | | | | | (petroleum ether/ethyl acetate, |
| | | | | | | | | | v/v = 5, PMA) |

### 2-(cyclooct-2-yn-1-yloxy)acetic acid (A-4, COT)

[chemical structure]

[1014] To a solution of compound A-3 (1.6 kg, crude) obtained above in DMSO (1.6 L) was added a solution of sodium methoxide in methanol (30%, 0.48 L) dropwise in 15 minutes, maintaining the temperature between 20° C. to 25° C. The resulting solution was stirred at 25° C. for an hour, which was monitored by TLC (eluting with petroleum ether/ethyl acetate, v/v=1, PMA, R_{f}=0.87 for compound A-3 was consumed and R_{f}=0.44 for compound A-4 was formed). The resulting mixture was quenched with cold water (16 L) and diluted with DCM (16 L). The aqueous layer was washed with DCM (4 L). The aqueous solution was acidified with aq. hydrochloride (1 M) to pH<2, and was then extracted with MTBE (8 L×2). The combined MTBE solution was washed with water (8 L), dried over anhydrous sodium sulfate, and concentrated in vacuo. The residue was purified by silica gel column chromatography (eluting with petroleum ether/ethyl acetate, v/v=10/1 to 5/1) to give crude product A-4, which was suspended in hexane (5 L) and stirred at 25° C. for 3 hours. The suspension was centrifuged for 10 minutes, and filtered to collect filter cake. The solid was dried in vacuum to give pure A-4 (0.63 kg, 47% yield in 3 steps from A-1) as a white solid. ESI m/z: 181.1 (M−H)+; ¹H NMR (400 MHz, CDCl₃) δ 10.26 (br s, 1H), 4.44-4.33 (m, 1H), 4.29-4.21 (m, 1H), 4.16 (br s, 1H), 2.31-2.22 (m, 1H), 2.22-2.12 (m, 2H), 2.10-2.00 (m, 1H), 1.97-1.78 (m, 3H), 1.70-1.61 (m, 2H), 1.54-1.43 (m, 1H) ppm. Alternative ¹H NMR (400 MHz, CDCl₃) δ 9.25 (br s, 1H, H-11), 4.39 (br dd, J=6.4, 5.3 Hz, 1H, H-6), 4.25 (d, J=16.8 Hz, 1H, H-9a), 4.09 (d, J=16.8 Hz, 1H, H-9b), 1.41-2.32 (m, 10H, 5×CH2). ¹³C NMR (400 MHz, CDCl3) δ ppm 175.4 (C-10), 101.8 (C-7), 91.0 (C-8), 73.0 (C-6), 65.5 (C-9), 42.1 (C-5), 34.2, 29.5, 26.1 (C-2, C-3, C-4), 20.6 (C-1) ppm.

| | Raw material | | | | | | | | | |
|---|---|---|---|---|---|---|---|---|---|---|
| | | NaOMe in | | | | | | | | |
| | | MeOH | Solvent | | Temp. | Time | Product A-4 | | | Analytical data |
| # | A-3 | (30%) | DMSO | | ° C. | h | Amount | Yield | purity | TLC |
| 1 | 98 g | 0.44 L | 98 | mL | 25 | 2 | 35 g | | >95% | petroleum ether/ethyl acetate, v/v = |
| | | | | | | | | | | 1, PMA, R_{f} = 0.38 |
| 2 | 0.46 kg | 2.0 L | 0.46 | L | 25 | 2 | 0.36 kg | | >95% | petroleum ether/ethyl acetate, v/v = |
| 3 | 0.55 kg | 2.4 L | 0.55 | L | 25 | 2 | | | | 1, PMA, R_{f} = 0.38 |
| 4 | 1.8 kg | 7.8 L | 1.8 | L | 25 | 2 | 0.63 kg | 47% in 3 | >95% | petroleum ether/ethyl acetate, v/v = |
| | | | | | | | | steps | | 1, PMA, R_{f} = 0.38 |

### 2,5-dioxopyrrolidin-1-yl 2-(cyclooct-2-yn-1-yloxy)acetate (Aa)

[chemical structure]

[1016] To a solution of compound A-4 (COT) (0.31 kg, 2.2 mol) and HOSu (0.25 kg, 5.1 mol) in DCM (3.1 L) was added a solution of DCC (0.39 g, 1.9 mol) in DCM (0.30 L), and the mixture was stirred at 25° C. for 16 hours, which was monitored by TLC (eluting with petroleum ether/ethyl acetate, v/v=1, PMA, R_{f}=0.25 for COT was consumed and R_{f}=0.45 for compound Aa was formed). The mixture was filtered and the filtrate was concentrated in vacuo to give crude product Aa (0.53 kg, crude, containing DCU) as a white solid, which was used for the next step without further purification. ¹H NMR (400 MHz, DMSO_{d6}) δ 4.64-4.54 (m, 1H), 4.49-4.36 (m, 2H), 2.82 (br, 4H), 2.30-2.02 (m, 3H), 1.98-1.66 (m, 4H), 1.65-1.55 (m, 2H), 1.48-1.36 (m, 1H) ppm.

| | Raw material | | | Solvent | Temp | Time | Product Aa | | Product |
|---|---|---|---|---|---|---|---|---|---|
| # | A-4 | HOSu | DCC | DCM | ° C. | h | Amount | Yield | TLC |
| 1 | 30 g | 25 g | 37 g | 0.30 L + 30 mL | 0-25 | 16 | 51 g | Crude | petroleum ether/ethyl |
| | | | | | | | | | acetate, v/v = 1, PMA, R_{f} = 0.43 |
| 2 | 0.31 kg | 0.25 kg | 0.39 kg | 3.1 L + 0.3 L | 0-25 | 16 | 0.53 kg | Crude | petroleum ether/ethyl |
| | | | | | | | | | acetate, v/v = 1, PMA, R_{f} = 0.43 |

### perfluorophenyl 2-(cyclooct-2-yn-1-yloxy)acetate (COT-PFP) (Ab)

[chemical structure]

[1018] To a solution of compound A-4 (COT) (90.0 g, 0.494 mol) and pentafluorophenol (100 g, 0.543 mol, 1.10 eq.) in DCM (0.45 L) was added a solution of DCC (112 g, 0.543 mol, 1.10 eq.) in DCM (0.45 L) within 30 minutes, and the mixture was stirred at 20° C. for 12 hours, which was monitored by TLC (eluting with petroleum ether/ethyl acetate, v/v=1, PMA, R_{f}=0.30 for COT was consumed and R_{f}=0.50 for compound Ab was formed). The mixture was filtered and the filtrate was concentrated in vacuo. The residue was purified by silica gel column chromatography (petroleum ether/ethyl acetate, v/v=50 to 10) to give crude product Ab (136 g, 375 mmol, 76% yield) as a white solid. ¹H NMR (400 MHz, CDCl₃) δ 4.59-4.54 (m, 1H), 4.50-4.43 (m, 2H), 2.35-2.14 (m, 3H), 2.14-2.04 (m, 1H), 2.02-1.79 (m, 3H), 1.68 (m, 2H), 1.58-1.46 (m, 1H) ppm.

### Example 21. Synthesis of intermediate B (Scheme 7)

[1019] The synthesis of intermediate B was reported in WO2019094395.

### 1-[2-(Cyclooct-2-yn-1-yloxy)acetamido]-3,6,9,12-tetraoxapentadecan-15-oic acid (B)

[chemical structure]

[1021] To a mixture of intermediate A (0.50 g, 1.8 mmol) and amido-PEG4-acid (B-1) (0.65 g, 1.8 mmol) in DMF (3 mL) was added DIPEA (1.2 g, 9.0 mmol) at room temperature. The mixture was stirred at room temperature for 30 minutes. The resulting mixture was directly purified by prep-HPLC (5-95% acetonitrile in aq. TFA (0.01%)) to give intermediate B (0.70 g, 91% yield) as light yellow oil. ESI m/z: 430 (M+H)⁺.

### Example 22. Synthesis of compound 4

[1022] Synthesis of compound 4 is described in Example 5.

### Example 23. Exemplary Synthesis of intermediate D by route a (Scheme 10)

### N-[(1S)-1-{[(1 S)-4-(carbamoylamino)-1-{[4-(hydroxymethyl)phenyl]carbamoyl}butyl]carbamoyl}-2-methylpropyl]-1-[2-(cyclooct-2-yn-1-yloxy)acetamido]-3,6,9,12-tetraoxapentadecan-15-amide (D1-2)

[chemical structure]

[1024] To a stirred solution of intermediate B (0.14 g, 0.33 mmol) in DCM (5 mL) were added HOSu (84 mg, 0.73 mmol) and EDCI (0.14 g, 0.73 mmol), and the reaction mixture was stirred at room temperature for 2 hours, which was monitored by LCMS. The mixture was diluted with DCM, washed with water (3×) and brine, dried over anhydrous sodium sulfate and concentrated in vacuo. The residue was dissolved in DMF (10 mL). To the solution were added DIPEA (0.13 g, 1.0 mmol) and vcPAB (0.13 g, 0.34 mmol), and the reaction mixture was stirred at RT for an hour. Reaction completion was monitored by LCMS. The resulting mixture was directly purified by reversed phase flash chromatography (0-80% acetonitrile in water) to give compound D1-2 (0.18 g, 70% yield) as colorless oil. ESI m/z: 791.3 (M+H)⁺. 1H NMR (400 MHz, DMSOd6) δ 9.91 (S, 1H), 8.11 (d, J=8.4 Hz, 1H), 7.89 (d, J=8.8 Hz, 1H), 7.61 (t, J=5.6 Hz, 1H), 7.55 (d, J=8.4 Hz, 2H), 7.23 (d, J=8.4 Hz, 2H), 5.98 (t, J=5.6 Hz, 1H), 5.42 (s, 2H), 5.10 (br s, 1H),), 4.43 (s, 2H), 4.39-4.37 (m, 1H), 4.30-4.21 (m, 2H), 3.87 (d, J=14.8 Hz, 1H), 3.75(d, J=14.8 101 WO 2021/174113 PCT/US2021/020074 Hz, 1H), 3.62-3.58 (m, 2H), 3.50-3.46 (m, 12H), 3.43 (t, J=6.0 Hz, 2H), 3.27-3.22 (m, 2H), 3.06-2.92 (m, 2H), 2.41-2.32 (m, 2H), 2.26-2.05 (m, 3H), 1.99-1.66 (m, 6H), 1.62-1.55 (m, 3H), 1.44-1.35 (m, 3H), 0.89 (d, J=6.8 Hz, 3H), 0.83 (d, J=6.8 Hz, 3H) ppm.

### {4-[(2S)-5-(carbamoylamino)-2-[(2S)-2-{1-[2-(cyclooct-2-yn-1-yloxy)acetamido]-3,6,9,12-tetraoxapentadecan-15-amido}-3-methylbutanamido]pentanamido]phenyl}methyl 4-nitrophenyl carbonate (Da)

[chemical structure]

[1026] A suspension of compound D1-2 (80 mg, 0.10 mmol), DMAP (12 mg, 0.10 mmol) and DIPEA (26 mg, 0.20 mmol) in dry DMF (5 ml.) was stirred at RT for 10 minutes before the addition of bis(4-nitrophenyl) carbonate (61 mg, 0.20 mmol). The reaction mixture was stirred at RT for 2 hours. Reaction completion was monitored by LCMS. The resulting mixture was directly purified by reversed phase flash chromatography (0-80% acetonitrile in water) to give intermediate Da (53 mg, 55% yield) as a white solid. ESI m/z: 956.3 (M+H)⁺.

### Example 24. Exemplary Synthesis of intermediate D by route b (Scheme 11) 2,5-dioxopyrrolidin-1-yl 1-({[(9H-fluoren-9-yl)methoxy]carbonyl}amino)-3,6,9,12-tetraoxapentadecan-15-oate (D-2) (small scale)

[chemical structure]

[1028] To a solution of Fmoc-N-amido-PEG4-acid (D-1) (0.74 kg, 1.5 mol, CAS: 557756-85-1) and HOSu (0.26 kg, 2.3 mol) in DCM (7.4 L) was added a solution of DCC (0.41 kg, 2.0 mol) in DCM (7.4 L) dropwise (40 mL per minute) under nitrogen atmosphere maintaining the temperature below 5° C. After the addition, the reaction mixture was stirred at 25° C. for 2 hours, which was monitored by TLC (eluting with ethyl acetate, R_{f}=0.40 for D-1 consumed and R_{f}=0.51 for D-2 formed). The resulting mixture was filtered, and the filtrate was concentrated in vacuo to give crude product D-2 (1.1 kg, crude, contaminated with DCU) as a white solid, which was used for the next step without further purification. ¹H NMR (400 MHz, CDC₃) δ 7.76 (d, J=7.5 Hz, 2H), 7.61 (d, J=7.4 Hz, 2H), 7.43-7.37 (m, 2H), 7.35-7.29 (m, 2H), 6.20 (br, 1H), 5.42 (br s, 1H), 4.41 (br d, J=6.9 Hz, 2H), 4.28-4.19 (m, 1H), 3.82 (br t, J=6.4 Hz, 2H), 3.66-3.61 (m, 12H), 3.57 (br t, J=4.9 Hz, 2H), 3.42-3.35 (m, 2H), 2.94-2.82 (m, 4H) ppm.

| | Raw material | | | Solvent | Temp. | Time | Product D-2 | | | Product |
|---|---|---|---|---|---|---|---|---|---|---|
| # | D-1 | HOSu | DCC | DMSO | ° C. | h | Amount | Yield | purity | TLC |
| 1 | 20 g | 7.1 g | 11 g | 0.40 L | 0-25 | 2 | 29 g | | Crude | ethyl acetate, |
| | | | | | | | | | | PMA, R_{f} = 0.51 |
| 2 | 0.74 kg | 0.26 kg | 0.41 kg | 15 L | 0-25 | 12 | 1.1 kg | | Crude | ethyl acetate, |
| | | | | | | | | | | PMA, R_{f} = 0.51 |

### 2,5-dioxopyrrolidin-1-yl 1-({[(9H-fluoren-9-yl)methoxy]carbonyl}amino)-3,6,9,12-tetraoxapentadecan-15-oate (D-2) (large scale)

[1029] To a solution of Fmoc-N-amido-PEG4-acid (D-1) (1.8 kg, 3.7 mol, CAS: 557756-85-1) and HOSu (0.64 kg, 5.6 mol) in DCM (9.0 L) was added a solution of DCC (0.99 kg, 4.8 mol) in DCM (9.0 L) dropwise (450 mL per minute) within 20 minutes under nitrogen atmosphere maintaining the temperature below 5° C. After the addition, the reaction mixture was stirred at 25° C. for 2 hours, which was monitored by TLC (eluting with ethyl acetate, R_{f}=0.35 for D-1 consumed and R_{f}=0.55 for D-2 formed). The resulting mixture was filtered and the filtrate was concentrated in vacuo to give crude product D-2 (2.1 kg, crude, contaminated with DCU) as light yellow oil, which was used for the next step without further purification.

### (9H-fluoren-9-yl)methyl N-(14-{[(1S)-1-{[(1S)-4-(carbamoylamino)-1-{[4-(hydroxymethyl)phenyl]carbamoyl}butyl]carbamoyl}-2-methylpropyl]carbamoyl}-3,6,9,12-tetraoxatetradecan-1-yl)carbamate (D-3)

[chemical structure]

[1031] To a solution of compound D-2 (1.1 kg, crude, obtained above) in DMF (5.0 L) was added a solution of vcPAB (0.72 kg, 1.90 mol) in DMF (5.0 L) dropwise over 30 minutes, maintaining the temperature between 0° C. to 5° C. After the addition, the reaction mixture was stirred at 25° C. for 16 hours, which was monitored by TLC (eluting with DCM/methanol, v/v=8/1, PMA, R_{f}=0.57 for D-2 consumed and R_{f}=0.25 for D-3 formed). The resulting mixture was poured into a stirred aq. hydrochloride (1 M, 20 L) and the mixture was extracted with DCM/methanol (v/v=10/1, 20 L×3). The combined organic solution was washed with brine (5 L), dried over anhydrous sodium sulfate, and concentrated in vacuo. The residue was dissolved in DCM/methanol (v/v=10/1, 5 L) and the solution was dropwise added into MTBE (50 L) and stood for half an hour to precipitate a white solid, which was collected by filtration and dried in vacuum to give compound D-3 (0.94 kg, 73% yield in 2 steps from D-1) as a white solid. ¹H NMR (400 MHz, DMSO_{d6}) δ 9.92 (s, 1H), 8.87-8.50 (m, 1H), 8.11 (br d, J=7.4 Hz, 1H), 7.94-7.81 (m, 3H), 7.69 (br d, J=7.3 Hz, 2H), 7.57 (br d, J=8.4 Hz, 2H), 7.41 (br t, J=7.4 Hz, 2H), 7.38-7.28 (m, 3H), 7.24 (br d, J=8.4 Hz, 2H), 6.41-5.74 (m, 1H), 4.55-4.37 (m, 3H), 4.37-4.11 (m, 4H), 3.66-3.56 (m, 2H), 3.55-3.44 (m, 11H), 3.41 (br t, J=5.69 Hz, 2H), 3.14 (br d, J=5.50 Hz, 2H), 3.10-2.92 (m, 2H), 2.49-2.43 (m, 1H), 2.43-2.30 (m, 1H), 2.19-1.82 (m, 1H), 1.81-1.68 (m, 1H), 1.67-1.55 (m, 1H), 1.52-1.32 (m, 2H), 1.00-0.80 (m, 6H) ppm.

| | Raw material | | Solvent | Temp | Time | Product D-3 | | | Product |
|---|---|---|---|---|---|---|---|---|---|
| # | D-2 | vcPAB | DMF | ° C. | H | Amount | Yield | purity | TLC |
| 1 | 29 g | 20 g | 0.29 L | 0-25 | 16 | 25 g | | 96% | DCM/MeOH, v/v = 8/1, PMA, R_{f} = 0.25 |
| 2 | 0.15 kg | 98 g | 1.5 L | 0-25 | 16 | 0.14 kg | | 96% | DCM/MeOH, v/v = 8/1, PMA, R_{f} = 0.25 |
| 3 | 1.1 kg | 0.72 kg | 11 L | 0-25 | 16 | 0.94 kg | 73% in 2 | 95% | DCM/MeOH, v/v = 8/1, PMA, R_{f} = 0.25 |
| | | | | | | | steps | | |

### N-[(1S)-1-{[(1S)-4-(carbamoylamino)-1-{[4-(hydroxymethyl)phenyl]carbamoyl}butyl]carbamoyl}-2-methylpropyl]-1-[2-(cyclooct-2-yn-1-yloxy)acetamido]-3,6,9,12-tetraoxapentadecan-15-amide (D-4a)

[chemical structure]

[1033] To a solution of Fmoc-N-amido-PEG4-vcPAB (D-3) (0.74 kg, 0.87 mol) in DMF (5.9 L) were added DBU (11 mL, 87 mmol) and triethylamine (190 mL, 1.74 mol) dropwise maintaining the temperature between 20-25° C. The reaction mixture was then stirred at 25° C. for 16 hours, and to the solution was added a solution of intermediate Aa (0.344 kg, 1.05 mol, 84.8% purity, 1.2 eq) in DMF (1.5 L). The reaction mixture was stirred for another hour and was monitored by TLC (eluting with petroleum ether/ethyl acetate, v/v=3/1, PMA, R_{f}=0.15 for D-3 consumed and R_{f}=0.40 for D-4a formed). The resulting mixture was poured into cold water (9.0 L) and washed with ethyl acetate (9.0 L). The aqueous phase was extracted with DCM (9.0 L×3) and the combined DCM solution was dried over anhydrous sodium sulfate and concentrated in vacuo. The residue was purified by prep-HPLC to give compound D-4a (0.37 kg, 52.6% yield) as a white solid. ¹H NMR (400 MHz, DMSO_{d6}) δ 9.89 (s, 1H), 8.09 (br d, J=7.4 Hz, 1H), 7.88 (br d, J=8.5 Hz, 1H), 7.68-7.45 (m, 3H), 7.24 (br d, J=7.9 Hz, 2H), 5.98 (br s, 2H), 5.09 (br t, J=5.2 Hz, 1H), 4.53-4.34 (m, 3H), 4.32-4.16 (m, 2H), 3.94-3.82 (m, 1H), 3.81-3.71 (m, 1H), 3.60 (br s, 2H), 3.56-3.25 (m, 14H), 3.30-3.20 (m, 2H), 3.07-2.89 (m, 2H), 2.50-2.33 (m, 2H), 2.29-2.04 (m, 3H), 2.02-1.82 (m, 3H), 1.81-1.65 (m, 3H), 1.64-1.50 (m, 3H), 1.49-1.29 (m, 3H), 1.00-0.80 (m, 6H) ppm.

| | Raw material | | | | | Solvent | Temp. | Time | Product D-4a | | | Product |
|---|---|---|---|---|---|---|---|---|---|---|---|---|
| # | D-3 | Int A | DBU | Et3N | | DMF | ° C. | H | Amount | Yield | purity | TLC |
| 1 | 15 g | 10 g | 0.23 mL | 4.9 | mL | 0.15 L | 0-25 | 16 + 1 | 6.0 g | | 97% | DCM/MeOH, v/v = |
| | | | | | | | | | | | | 10/1, PMA, R_{f} = 0.51 |
| 2 | 0.10 kg | 68 g | 1.5 mL | 13 | mL | 1.0 L | 0-25 | 16 + 1 | 51 g | | 97% | DDCM/MeOH, v/v = |
| | | | | | | | | | | | | 10/1, PMA, R_{f} = 0.51 |
| 3 | 0.74 kg | 0.50 kg | 11 mL | 95 | mL | 7.4 L | 0-25 | 16 + 1 | 0.32 kg | 54% | 96% | DCM/MeOH, v/v = |
| | | | | 1.7 | mol | | | | | | | 10/1, PMA, R_{f} = 0.51 |
| | | | | 87 | mmol | | | | 50 g | | 86% | DCM/MeOH, v/v = |

10/1, PMA, R_{f} = 0.51

### N-[(1S)-1-{[(1S)-4-(carbamoylamino)-1-{[4-(hydroxymethyl)phenyl]carbamoyl}butyl]carbamoyl}-2-methylpropyl]-1-[2-(cyclooct-2-yn-1-yloxy)acetamido]-3,6,9,12-tetraoxapentadecan-15-amide (D-4a) (2-step method)

[chemical structure]

[1035] To a solution of Fmoc-N-amido-PEG4-vcPAB (0-3) (2.7 kg, 3.2 mol, 1.0 eq.) in THF (13.5 L) and water (13.5 L) was added DBU (0.70 kg, 0.63 L, 4.5 mol, 1.4 eq.) within 20 minutes maintaining the temperature between 10-20° C. The reaction mixture was then stirred at 20° C. for an hour, which was monitored by LCMS. The resulting mixture was extracted with 2-Me-THF (10 L×2) at 20° C. to remove fluorene olefin. The crude product in the aqueous solution (1.9 kg, crude) was used for the next step without further purification.

[1036] To a solution of the crude product (1.9 kg), obtained as described above, in water (10 L) was added a solution of COT-PFP (Ab) (1.1 kg, 3.1 mol) in THF (10 L) dropwise within 30 minutes maintaining the temperature below 25° C. The reaction mixture was stirred at 25° C. for an hour, which was monitored by LCMS. The resulting mixture was washed with ethyl acetate (5 L×2) to remove impurities. The aqueous phase was acidified with aq. HCl (0.5 M) until pH 3-4 at 20° C., and then extracted with DCM/MeOH (v/v=10, 10 L×3). The combined organic solution was dried over anhydrous sodium sulfate and concentrated in vacuo below 40° C. The residue was dissolved in DCM/MeOH (v/v=10, 8.0 L), and the solution was added into MTBE (150 L) dropwise for an hour. Solid was precipitated and the suspension was stood for 10 hours. The mixture was filtered. The solid was washed with MTBE (5.0 L) and dried in vacuo below 40° C. to give compound D-4a (2.0 kg, 94.8% purity, 2.4 mol, 80% yield) as a white solid. ¹H NMR (DMSO-d6, Bruker_G_400 MHz) δ 9.89 (s, 1H), 8.09 (d, J=7.6 Hz, 1H), 7.87 (d, J=8.6 Hz, 1H), 7.63-7.51 (m, 3H), 7.23 (d, J=8.4 Hz, 2H), 5.98 (br t, J=5.7 Hz, 1H), 5.40 (s, 2H), 5.09 (t, J=5.7 Hz, 1H), 4.42 (d, J=5.6 Hz, 2H), 4.38 (br d, J=5.5 Hz, 1H), 4.28 (br dd, J=5.2, 6.7 Hz, 1H), 4.23 (dd, J=6.8, 8.5 Hz, 1H), 3.92-3.84 (m, 1H), 3.78-3.72 (m, 1H), 3.59 (tt, J=3.3, 6.4 Hz, 2H), 3.52-3.47 (m, 12H), 3.42 (t, J=5.9 Hz, 2H), 3.25 (q, J=5.7 Hz, 2H), 3.06-2.90 (m, 2H), 2.48-2.44 (m, 1H), 2.42-2.34 (m, 1H), 2.28-2.13 (m, 2H), 2.01-1.82 (m, 3H), 1.81-1.64 (m, 4H), 1.64-1.52 (m, 3H), 1.50-1.31 (m, 3H), 0.85 (dd, J=6.8, 12.6 Hz, 6H) ppm.

### {4-[(2S)-5-(carbamoylamino)-2-[(2S)-2-{1-[2-(cyclooct-2-yn-1-yloxy)acetamido]-3,6,9,12-tetraoxapentadecan-15-amido}-3-methylbutanamido]pentanamido]phenyl}methyl 4-nitrophenyl carbonate (Da)

[chemical structure]

[1038] To a solution of compound D-4a (0.18 kg, 0.22 mol) in DMF (1.8 L) at 22-25° C. was added DIPEA (0.12 L, 0.67 mol) dropwise during 2 minutes. The solution was cooled to 0-5° C. and to the cold solution were added bis(4-nitrophenyl) carbonate (PNP) (0.10 kg, 0.34 mol) portionwise in 15 minutes and DMAP (14 g, 110 mmol) in one portion successively. The mixture was slowly warmed and stirred at 22-25° C. for 3 hours, which was monitored by TLC (eluting with DCM/methanol, v/v=10/1, PMA, R_{f}=0.25 for D-4a consumed and R_{f}=0.45 for Da formed). The mixture was cooled to 0-5° C. and diluted with ethyl acetate (1.8 L) and poured into a stirred and cold aq. hydrochloride (0.5 M, 1.8 L). The mixture was stirred for a minute and separated. The aqueous phase was extracted with ethyl acetate (0.90 L). The combined organic solution was washed with brine, dried over anhydrous sodium sulfate, and concentrated in vacuo to around 1 L, keeping the temperature of water bath below 35° C. The residue was added dropwise to isopropyl ether (10 L) over 5 minutes and stood for half an hour. The precipitates were collected by filtration and triturated in MTBE (2 L) twice and in petroleum ether (2 L) once. The precipitates were collected and dried to give crude Da as an off-white solid, which was purified by prep-HPLC (5-95% acetonitrile in aq. formic acid (0.1%)) to give Da (80 g, 37% yield) as a white solid. ¹H NMR (400 MHz, DMSO_{d6}) δ 10.05 (s, 1H), 8.31 (d, J=8.8 Hz, 2H), 8.13 (br d, J=6.8 Hz, 1H), 7.87 (br d, J=8.5 Hz, 1H), 7.65 (d, J=8.13 Hz, 2H), 7.62-7.48 (m, 3H), 7.41 (d, J=8.3 Hz, 2H), 5.98 (br t, J=5.6 Hz, 1H), 5.42 (s, 2H), 5.24 (s, 2H), 4.44-4.34 (m, 1H), 4.32-4.19 (m, 2H), 3.91-3.83 (m, 1H), 3.79-3.72 (m, 1H), 3.64-3.56 (m, 2H), 3.56-3.45 (m, 12H), 3.45-3.40 (m, 2H), 3.30-3.20 (m, 2H), 3.09-2.89 (m, 2H), 2.48-2.44 (m, 1H), 2.42-2.31 (m, 1H), 2.27-2.02 (m, 3H), 2.02-1.82 (m, 3H), 1.81-1.66 (m, 3H), 1.65-1.52 (m, 3H), 1.49-1.31 (m, 3H), 0.90-0.80 (m, 6H) ppm.

| | Raw material | | | | | | Solvent | | Temp | Time | Product Da | | | Product |
|---|---|---|---|---|---|---|---|---|---|---|---|---|---|---|
| # | D-4a | PNP | DIPEA | | DMAP | | DMF | | ° C. | H | Amt | Yield | purity | TLC |
| 1 | 5.0 g | 2.9 g | 3.3 | mL | 77 | mg | 50 | mL | 0-25 | 4 | 22 g | | 98% | DCM/MeOH, v/v = 10/1, |
| 2 | 45 g | 26 g | 30 | mL | 3.5 | g | 0.45 | L | 0-25 | 4 | | | | PMA, R_{f} = 0.43 |
| 3 | 0.18 kg | 0.10 kg | 0.12 | L | 14 | g | 1.8 | L | 0-25 | 4 | 85 g | | 98% | DCM/MeOH, v/v = 10/1, |

PMA, R_{f} = 0.43

### {4-[(2S)-5-(carbamoylamino)-2-[(2S)-2-{1-[2-(cyclooct-2-yn-1-yloxy)acetamido]-3,6,9,12-tetraoxapentadecan-15-amido}-3-methylbutanamido]pentanamido]phenyl}methyl 4-nitrophenyl carbonate (Da) (alternative method)

[1039] To a solution of compound D-4a (0.40 kg, 94.8% purity, 0.48 mol) in DMF (4 L) was added DIPEA (186 g, 1.44 mol) dropwise during 10 minutes. To the solution were added bis(4-nitrophenyl) carbonate (PNP) (0.22 kg, 0.72 mol) portionwise (4 batches within an hour) and DMAP (5.9 g, 48 mmol) in one portion successively at 5° C. The mixture was stirred at 20° C. for 3 hours, which was monitored by LCMS.

[1040] 4 batches (total 1.6 kg D-4a) of parallel reaction mixtures were combined. The mixture was diluted with ethyl acetate (20 L), and a cold aq. hydrochloride (0.5 M, 20 L) was added into the mixture. The mixture was stirred for 5 minutes and separated. The aqueous phase was extracted with ethyl acetate (10 L). The combined organic solution was washed with brine (15 L), dried over anhydrous sodium sulfate, and concentrated in vacuo to around 6 L. The residue was added dropwise to MTBE (55 L), which was slowly stirred at 20° C., during 2 hours. The precipitates were collected by filtration and triturated in MTBE (40 L) twice. The precipitates were collected and dried to give crude Da as an off-white solid, which was purified by prep-HPLC (5-95% acetonitrile in aq. formic acid (0.1%)) to give Da (1.0 kg, 98.7% purity, 38% yield) as a white solid.

[1041] RT=14.6 min in HPLC; RT=4.17 min, 3.54 min in chiral SFC; ESI m/z: 956.7 (M+H)+.

[1042] ¹H NMR (DMSO-d6, Bruker_G_400 MHz) δ 10.06 (s, 1H), 8.35-8.29 (m, 2H), 8.14 (d, J=7.4 Hz, 1H), 7.88 (d, J=8.6 Hz, 1H), 7.66 (d, J=8.5 Hz, 2H), 7.62-7.54 (m, 3H), 7.42 (d, J=8.5 Hz, 2H), 5.98 (s, 1H), 5.42 (s, 2H), 5.25 (s, 2H), 4.39 (br d, J=5.8 Hz, 1H), 4.30-4.20 (m, 2H), 3.90-3.84 (m, 1H), 3.79-3.72 (m, 1H), 3.60 (dt, J=3.4, 6.3 Hz, 2H), 3.54-3.47 (m, 12H), 3.42 (t, J=5.9 Hz, 2H), 3.28-3.21 (m, 2H), 3.08-2.90 (m, 2H), 2.47 (s, 1H), 2.40 (s, 1H), 2.25-2.03 (m, 3H), 2.02-1.83 (m, 3H), 1.81-1.67 (m, 3H), 1.65-1.52 (m, 3H), 1.50-1.31 (m, 3H), 0.85 (dd, J=6.8, 13.4 Hz, 6H) ppm.[

### N-[(1S)-1-{[(1S)-4-(carbamoylamino)-1-{[4-(hydroxymethyl)phenyl]carbamoyl}butyl]carbamoyl}-2-methylpropyl]-1-{2-[4-(6-methyl-1,2,4,5-tetrazin-3-yl)phenyl]acetamido}-3,6,9,12-tetraoxapentadecan-15-amide (D-4d)

[chemical structure]

[1044] To a yellow solution of intermediate Ad (0.11 g, 0.48 mmol) and DIPEA (0.19 g, 1.44 mmol) in dry DMF (2 mL) was added HATU (0.22 g, 0.57 mmol) and the mixture was stirred at room temperature for half an hour. To the stirred solution was then added amino-PEG4-vcPAB (0.27 g, 0.43 mmol). The reaction solution was stirred for 2 hours, which was monitored by LCMS. The resulting mixture was directly separated by prep-HPLC (5-95% acetonitrile in aq. TFA (0.01%)) to afford compound D-4d (0.44 g, 93% yield) as a red solid. ESI m/z: 839 (M+H)⁺.

### {4-[(2S)-5-(carbamoylamino)-2-[(2S)-3-methyl-2-(1-{2-[4-(6-methyl-1,2,4,5-tetrazin-3-yl)phenyl]acetamido}-3,6,9,12-tetraoxapentadecan-15-amido)butanamido]pentanamido]phenyl}methyl 4-nitrophenyl carbonate (Dd)

[chemical structure]

[1046] Following the similar procedure as intermediate Da except using D-4d instead of D-4a, intermediate Dd (0.24 g, 46% yield) was obtained as a red solid. ESI m/z: 1004 (M+H)+, 1026 (M+Na)⁺. ¹H NMR (400 MHz, DMSO_{d6}) δ 10.07 (s, 1H), 8.40 (d, J=8.3 Hz, 2H), 8.34-8.30 (m, 2H), 8.26 (t, J=5.6 Hz, 1H), 8.19-8.09 (m, 2H), 7.89 (d, J=8.6 Hz, 1H), 7.66 (d, J=8.6 Hz, 2H), 7.61-7.51 (m, 4H), 7.41 (d, J=8.6 Hz, 2H), 6.96-6.90 (m, 1H), 6.00 (t, J=5.6 Hz, 1H), 5.43 (br, 2H), 5.24 (br, 2H), 4.41-4.38 (m, 1H), 4.25-4.21 (m, 1H), 3.64-3.55 (m, 4H), 3.54-3.45 (m, 12H), 3.30-3.20 (m, 2H), 3.14-3.10 (m, 1H), 3.09-2.88 (m, 5H), 2.39-2.36 (m, 1H), 1.99-1.94 (m, 1H), 1.76-1.54 (m, 2H), 1.44-1.26 (m, 2H), 0.87-0.82 (m, 6H) ppm.

### Example 25. Exemplary Synthesis of intermediate E (Scheme 12)

### Synthesis of Intermediate Ea

### (2-{[({4-[(2S)-5-(carbamoylamino)-2-[(2S)-2-{1-[2-(cyclooct-2-yn-1-yloxy)acetamido]-3,6,9,12-tetraoxapentadecan-15-amido}-3-methylbutanamido]pentanamido]phenyl}methoxy)carbonyl]amino}acetamido)methyl acetate (Ea)

[chemical structure]

[1048] To a mixture of DBU (13 mg, 85 μmol) and triethylamine (0.17 g, 1.7 mmol) in DMF (10 mL) was added Fmoc-GG-OH (2a) (0.30 g, 0.85 mmol), and the mixture was stirred at 25° C. for 16 hours until Fmoc was totally removed, which was monitored by LCMS. To the solution were added intermediate D (0.81 g, 0.85 mmol), HOAt (58 mg, 0.43 mmol) and DIPEA (0.22 g, 1.7 mmol), and the reaction mixture was stirred at 25° C. for 4 hours, which was monitored by LCMS. The reaction mixture was directly purified by prep-HPLC (5-95% acetonitrile in aq. TFA (0.05%)) to give compound E-1a (0.48 g, 59% yield) as a white solid. ESI m/z: 949.5 (M+H)⁺. To a solution of compound E-1a (0.40 g, 0.42 mmol) in DMF (5 mL) were added lead(IV) acetate (0.93 g, 2.1 mmol) and acetic acid (93 mg, 1.6 mmol), and the reaction mixture was stirred at 25° C. for 16 hours under nitrogen atmosphere, which was monitored by LCMS. The resulting mixture was quenched with sat. aq. sodium bicarbonate to pH 7.0 and filtered. The filtrate was directly purified by prep-HPLC (5-95% acetonitrile in aq. TFA (0.05%)) to give intermediate Ea (0.20 g, 48% yield) as a white solid. ESI m/z: 485.3 (M+Na)⁺.

### Example 26. Exemplary Synthesis of intermediate F (Scheme 13)

### Synthesis of Intermediate F using HOAt

### 2-[(2-{[({4-[(2S)-5-(carbamoylamino)-2-[(2S)-2-{1-[2-(cyclooct-2-yn-1-yloxy)acetamido]-3,6,9,12-tetraoxapentadecan-15-amido}-3-methylbutanamido]pentanamido]phenyl}methoxy)carbonyl]amino}acetamido)methoxy]ac etic acid (F)

[chemical structure]

[1050] To a stirred yellow solution of compound 4a (2.5 g, 6.5 mmol) in DMF (25 mL) were added DBU (0.10 g, 0.65 mmol) and triethylamine (1.3 g, 13 mmol) at 25° C., and the mixture was stirred at 25° C. for 16 hours until Fmoc was totally removed, which was monitored by LCMS. To the reaction mixture were then added a solution of intermediate D (5.0 g, 5.2 mmol) in DMF (5 mL) and HOAt (powder, 0.45 g, 3.3 mmol), and the mixture was stirred at 25° C. for 16 hours, which was monitored by LCMS. To the resulting mixture was added MTBE (2.5 L), and black oil (containing product F and DMF) was formed in the bottom. The MTBE layer (containing most Fmoc-ene and part of bases) was poured out and the layer was collected and purified directly by reversed phase flash chromatography (5-95% acetonitrile in aq. TFA (0.1%) in 60 minutes, flow rate 75 mL/min) to provide compound F (3.8 g, 62% yield, 88% purity in HPLC) as a white solid, 20 mg of which was further purified by prep-HPLC to give compound F (10 mg, >99% purity) as a white solid. ESI m/z: 979 (M+H)⁺.

### Synthesis of Intermediate F without HOAt

### 2-[(2-{[({4-[(2S)-5-(carbamoylamino)-2-[(2S)-2-{1-[2-(cyclooct-2-yn-1-yloxy)acetamido]-3,6,9,12-tetraoxapentadecan-15-amido}-3-methylbutanamido]pentanamido]phenyl}methoxy)carbonyl]amino}acetamido)methoxy]ac etic acid (F)

[chemical structure]

[1052] To a solution of compound 4a (73 g, 0.19 mol, 1.0 eq.) in DMF (0.73 L) was added DBU (43 g, 0.28 mol, 43 mL, 1.5 eq.). The mixture was stirred at 20° C. for an hour until Fmoc was totally removed according to LCMS spectra. The resulting mixture was poured into water (0.73 L). The aqueous solution was washed with DCM (0.70 L×3) to remove the fluorene olefin, and the residual aqueous phase was used directly.

[1053] To a solution of compound Da (0.14 kg, 0.15 mmol, 0.80 eq.) in THF (0.73 L) was added the aqueous solution obtained above (0.73 L), and the mixture was stirred at 20° C. for 24 hours. The reaction mixture was then washed with ethyl acetate (0.70 L×2) and the aqueous layer was directly separated by reversed phase flash chromatography (0-100% acetonitrile in aq. formic acid (0.1%)) to give compound F (91 g, 61% yield) as a white solid. ESI m/z: 979.6 (M+H)+.

### Synthesis of Intermediate F and LP1

### Step 1

[chemical structure]

[1055] Procedures: To a solution of compound C (73 g, 189 mmol, 1.00 eq) in DMF (730 mL) was added DBU (43.3 g, 284 mmol, 42.9 mL, 1.50 eq). The mixture was stirred at 20° C. for 1 hr. LCMS (EW46238-12-P1A1) showed the compound C was consumed completely. The reaction mixture was poured into H₂O (730 mL), then washed with DCM (700 mL*3) to remove the Fluorene olefin, the aqueous phase was used for the next step directly.

### Step 2

[chemical structure]

[1057] Procedures: To a solution of COT-PEG4-VC-PAB-PNP (144 g, 151 mmol, 0.80 eq) in THF (730 mL) was added and compound C1 (30.7 g, 189 mmol, 1.00 eq) in H₂O (730 mL). The mixture was stirred at 20° C. for 24 hrs. The reaction mixture was washed with EtOAc (700 mL*2). The crude product in the water layer was purified directly by reversed-phase HPLC or flash reverse phase chromatography using water/acetonitrile (0.1% TFA) mobile phases to afford Compound F with a purity of 98%. ESI m/z MH+ 979.6; Proton NMR: HNMR (DMSO-d6, Bruker_G_400 MHz) δ: 10.00 (s, 1H), 8.72 (br t, J=6.7 Hz, 1H), 8.12 (d, J=7.4 Hz, 1H), 7.88 (d, J=8.6 Hz, 1H), 7.60 (br d, J=8.4 Hz, 3H), 7.45 (t, J=6.1 Hz, 1H), 7.30 (br d, J=8.5 Hz, 2H), 6.14-5.90 (m, 1H), 4.97 (s, 2H), 4.61 (d, J=6.8 Hz, 2H), 4.45-4.35 (m, 2H), 4.31-4.21 (m, 3H), 3.99 (s, 2H), 3.91-3.85 (m, 1H), 3.79-3.73 (m, 1H), 3.65-3.56 (m, 4H), 3.52-3.47 (m, 12H), 3.46-3.41 (m, 2H), 3.25 (q, J=5.7 Hz, 2H), 3.09-2.89 (m, 2H), 2.50-2.44 (m, 1H), 2.42-2.34 (m, 1H), 2.28-2.03 (m, 3H), 2.02-1.81 (m, 3H), 1.80-1.65 (m, 3H), 1.64-1.51 (m, 3H), 1.47-1.30 (m, 3H), 0.85 (dd, J=6.8, 13.1 Hz, 6H). Intermediate F is then used to prepare LP1 by following Scheme 4A described above and further detailed showing below.

### Step 3

[chemical structure]

### Conjugations

### Example 27. Exemplary Conjugates

[1059] Generic procedures for making site-specific conjugates

[1060] Aglycosylated human antibody IgG (IgG1, IgG4, etc.) containing an N297Q or N297D mutation were used in ADC conjugations. Two Approaches (I & II) were conducted via two-step process (Scheme 19), and the conjugation results with the MS-DAR values are summarized in Table 10.

[1061] Step 1: site-specific conjugation of Handle-functionalized amine with an Antibody generated a drug conjugate containing 2, 4 or 8 handles per antibody.

[1062] Aglycosylated human antibody IgG containing an N297Q mutation or N297D mutation in BupH buffer (pH7.4) was mixed with >=100 molar equivalents of non-branched Handle-amine (AL) or branched Handle-amine (BL). The resulting solution was mixed with transglutaminase (25U/mL; 1 U mTG per mg of antibody, Zedira, Darmstadt, Germany; or 10 U/mL; 5.5U MTG per mg of antibody, Modernist Pantry-ACTIVA TI contains Maltodextrin from Ajinomoto, Japan) resulting in a final concentration of the antibody at 0.5-20 mg/mL. The reaction mixture was incubated at 25-37° C. for 24 hours while gently shaking while monitored by ESI-MS. Upon the completion, the excess amine and mTG were removed by size exclusion chromatography (SEC) or protein A column chromatography. The conjugate was characterized by UV-Vis, SEC and ESI-MS.

TABLE 9
List of Handles

| Cpd# | name | Structures | CAS | Availability |
|---|---|---|---|---|
| AL1 | TCO—(CH₂)₃NH₂ | [chemical structure] | 134179- 38-7 | Commercial |
| AL2a, n = 3 AL2b, n = 4 AL2c, n = 5 AL2d, n = 8 | TCO— PEG₃—NH₂ (CP2414) TCO— PEG₄—NH₂ TCO— PEG₅—NH₂ (CP2415) TCO— PEG₈—NH₂ | [chemical structure] | 1800507- 93-0 2243569- 24-4 2755509- 50-1 2353409- 92-2 | Commercial |
| AL3a, n = 3 AL3b, n = 4 | BCN— PEG₃—NH₂ (CP2373) BCN— PEG₄—NH₂ | [chemical structure] | 1883512- 27-3 1898221- 77-6 | Commercial |
| AL4a, n = 0 AL4b, n = 1 AL4c, n = 3 | COT— (CH₂)₂—NH₂ COT— PEG—NH₂ COT— PEG₃—NH₂ (CP2345), | [chemical structure] | 1809789- 76-1 2401876- 51-3 New | WO2022015656 WO2019240219 |
| AL5 | NBE— OCH₂CH₂—NH₂ | [chemical structure] | 92877- 26-4 | Commercial |
| AL6 | TzH—NH₂ | [chemical structure] | 1416711- 59-5 | Commercial |
| AL7 | Tz—NH₂ | [chemical structure] | 1596117- 29-1 | Commercial |
| AL8 | TzO— (CH₂)₃—NH₂ | [chemical structure] | 1802908- 03-7 | Commercial |
| AL9 | TzO— PEG₃—NH₂ | [chemical structure] | 2245150- 18-7 | Commercial |
| AL10a, n = 4 AL10b, n = 8 AL10c, n = 12 | Tz—NHCO— PEG₄—NH₂ Tz—NHCO— PEG₈—NH₂ Tz—NHCO— PEG₁₂—NH₂ | [chemical structure] | 2055646- 21-2 2143958- 58-9 New | Commercial Commercial |
| AL11a, n = 3 AL11b, n = 4 AL11c, n = 6 AL11d, n = 8 | Az— PEG₃—NH₂ Az— PEG₄—NH₂ Az— PEG₆—NH₂ Az— PEG₈—NH₂ | [chemical structure] | 134179- 38-7 951671- 92-4 957486- 82-7 857891- 82-8 | Commercial |
| BL1 | (Tz—NH)₂— BR₂—PEG₃— NH₂. | [chemical structure] | NEW | See Scheme 3 |
| BL2 | (Tz—NH) (Az—PEG₂)— BR₂—PEG₃—NH₂ | [chemical structure] | NEW | See Scheme 4 |
| BL3a, n = 0 BL3b, n = 3 | (Az— CH₂CH₂)₂—BR₂— PEG₃—NH₂ (Az— PEG₃)₂—BR₂— PEG₃—NH₂ | [chemical structure] | 2758876- 09-2 2758876- 11-6 | WO2022015656 |

| Code | Structure | MF | MW |
|---|---|---|---|
| AL2a | [chemical structure] | C₁₇H₃₂N₂O₅ | 344.5 |
| AL3a | [chemical structure] | C₁₉H₃₂N₂O₅ | 368.5 |
| AL4c | [chemical structure] | C₁₈H₃₂N₂O₅ | 356.5 |
| AL7 | [chemical structure] | C₁₀H₁₁N₅ | 201.2 |
| AL6 | [chemical structure] | C₉H₉N₅ | 187.2 |
| AL11a | NH₂—(CH₂CH₂O)₃—N₃ | C₈H₁₈N₄O₃ | 218 |
| BL1 | [chemical structure] | C₃₂H₄₂N₁₂O₅ | 674.8 |
| BL2 | [chemical structure] | C₂₈H₄₅N₁₁O₇ | 647.7 |
| BL3b | [chemical structure] | C₂₈H₅₆N₁₀O₁₁ | 708.8 |

[1063] Step 2: click reactions between Handle-functionalized antibodies and a Linker-Payload in Table 3 to generate the site-specific ADCs.

[1064] The Handle-functionalized antibody (Ab-(AL)ₙ or Ab-(BL)ₙ, 1-20 mg/mL) in PBS (pH7.4) was incubated with >2-10 molar equivalents of a linker-payload (LP) dissolved in an organic solvent such as DMSO or DMA (10 mg/mL) to have the reaction mixture containing 5-15% organic solvent (v/v), at 25-37° C. for 1-48 hours while gently shaking. The reaction was monitored by ESI-MS. Upon completion, the excess amount of LP and organic solvent were removed by desalting column with BupH (pH 7.4) and protein aggregates (if any) were removed by size exclusion chromatography (SEC). The purified conjugate, Ab-(AL-LP)ₙ ADC or Ab-(BL-LP)₄ ADC, was concentrated, sterile filtered and characterized by UV-Vis, SEC and ESI-MS. Conjugates monomer purity was >95% by SEC.

[1065] T-DXd was conjugated using our in-house Trastuzumab; both T-DXd and Isotype Ab-DXd ADCs were conjugated with Daiichi's maleimide-tetrapeptide GGFG-linker (“GGFG” disclosed as SEQ ID NO: 2142) DXd, Antibody interchain cysteine conjugations with the maleimide linker payload were accomplished using conventional procedures. Under physiological conditions, the imide ring of the linker connecting an antibody and the payload exists as an equilibrium between an opened ring and a closed five-membered imide ring. Those ADC species with an opened ring and a closed five-membered imide ring show the same or comparable activities in our research.

[1066] All ADCs were purified by SEC using an ÄKTA instrument from Cytiva, using a 16/600 Superdex® 200 column, eluting with DPBS, at a flow rate of 1.5 mL/min at pH 7.4. The DAR values of the ADCs were measured by ESI-MS. A mass increase of 4×LP from Ab-[AL]₄ was observed, correlating to 4DAR ADC. An additional mass increase of 7 to 8×LP from Ab-[BL]₄ was observed, indicating a 7 to 8DAR ADC.

[1067] A detailed conjugation procedure is described in FIG. 6.

[1068] A representative 4DAR ADC from Approach I is exemplified following. The aglycosylated anti-Her2 human IgG antibody containing an N297Q mutation was mixed with >200 molar equivalents of a azido-dPEG3-amine (AL1, MW 708.41 g/moL). The resulting solution was mixed with microbial transglutaminase (10U/mL; 5,5U mTG per mg of antibody, Modernist Pantry-ACTIVA TI contains Maltodextrin from Ajinomoto, Japan) resulting in a final concentration of the antibody at 5 mg/mL. The reaction mixture was incubated at 37° C. for 24 hours while gently shaking while monitored by ESI-MS. Upon the completion, the excess amine and mTG were removed by size exclusion chromatography (SEC). The conjugate was characterized by UV-Vis, SEC and ESI-MS. The azido linkers attached antibody resulted in a 808 Da mass increase compared to mAb, indicating 4 AL1 was conjugated to the antibody (Ab-(AL1)₄) with 4 azido handles. The site-specific antibody azido conjugate (2.1 mg/mL) in PBS (pH7.4) was mixed with 7 molar equivalents of linker-payload (LP1) in 2 mM of DMSO to have the reaction mixture containing 5% organic solvent (v/v), and the solution was set at 32° C. for 36 hours while gently shaking. The reaction was monitored by ESI-MS. Upon completion, the excess amount of linker-payload and protein aggregates were removed by size exclusion chromatography (SEC). The purified conjugate was concentrated, sterile filtered and characterized by UV-Vis, SEC and ESI-MS. Conjugates monomer purity was 99.8% by SEC. The drug attached antibody resulting in a 6388 Da mass increase for the DAR4 conjugate. Conjugates monomer purity was >99% by SEC.

[1069] Exemplary non-limiting embodiments of antibody-linkers and ADCs of the present disclosure are shown in Table 10, below. NTC stands for non-targeting control antibody.

TABLE 10
Listing of Antibodies, Antibody-Handles, and ADCs According to the Present Disclosure

| # | ADC# | DAR | Structures |
|---|---|---|---|
| 1 | aHer2 | | |
| | Ab | | |
| 2 | FelD1 | | |
| | Ab | | |
| 3 | aHer2- (AL11a)n | 4 | [chemical structure] |
| 4 | FelD1- (AL11a)n | 4 | [chemical structure] |
| 5 | aHer2- (AL2a)n | 4 | [chemical structure] |
| 6 | FelD1- (AL2a)n | 4 | [chemical structure] |
| 7 | aHer2- (AL3a)n | 3.94 | [chemical structure] |
| 8 | FelD1- (AL3a)n | 4 | [chemical structure] |
| 9 | aHER2- (AL7)n | 4 | [chemical structure] |
| 10 | FelD1- (AL7)n | 4 | [chemical structure] |
| 11 | aHER2- (AL6)n | 3.6 | [chemical structure] |
| 12 | aHer2- (BL1)n | 3.9 | [chemical structure] |
| 13 | FelD1- (BL1)n | 3.9 | [chemical structure] |
| 14 | aHer2- (BL3b)n | 3.8 | [chemical structure] |
| 15 | FelD1- (BL3b)n | 3.8 | [chemical structure] |
| 16 | aHer2- (AL6- LP1)n | 3.6 | [chemical structure] |
| 17 | aHer2- (AL6- LP13D)n | 6.2 | [chemical structure] |
| 18 | aHer2- (AL6- LP13)n | 6.5 | [chemical structure] |
| 19 | aHer2- (AL7- LP1)n | 3.7 | [chemical structure] |
| 20 | FelD1- (AL7- LP1)n | 3.9 | [chemical structure] |
| 21 | aHer2- (AL7- LP13)n | 7.3 | [chemical structure] |
| 22 | FelD1- (AL7- LP13)n | 7.3 | [chemical structure] |
| 23 | aHer2- (AL7- LP2)n | 3.83 | [chemical structure] |
| 24 | FelD1- (AL7- LP2)n | 3.80 | [chemical structure] |
| 25 | aHer2- (AL7- LP3)n | 3.88 | [chemical structure] |
| 26 | FelD1- (AL7- LP3)n | 3.82 | [chemical structure] |
| 27 | aHer2- (AL7- LP4)n | 3.84 | [chemical structure] |
| 28 | FelD1- (AL7- LP4)n | 3.82 | [chemical structure] |
| 29 | aHer2- (AL7- LP5)n | 3.80 | [chemical structure] |
| 30 | FelD1- (AL7- LP5)n | 3.69 | [chemical structure] |
| 31 | aHer2- (AL7- LP7)n | 3.70 | [chemical structure] |
| 32 | FelD1- (AL7- LP7)n | 3.68 | [chemical structure] |
| 33 | aHer2- (AL7- LP9)n | 3.81 | [chemical structure] |
| 34 | FelD1- (AL7- LP9)n | 3.89 | [chemical structure] |
| 35 | aHer2- (AL7- LP12)n | 3.82 | [chemical structure] |
| 36 | FelD1- (AL7- LP12)n | 3.83 | [chemical structure] |
| 37 | aHer2- (AL7- LP5D)n | 3.89 | [chemical structure] |
| 38 | aHer2- (AL7- LP5D)n | 3.90 | [chemical structure] |
| 39 | aHer2- (AL4c- LP1B)n | 3.49 | [chemical structure] |
| 40 | FelD1- (AL4c- LP1B)n | 3.45 | [chemical structure] |
| 41 | aHer2- (AL4c- LP13C)n | 7.07 | [chemical structure] |
| 42 | aHer2- (AL4c- LP13C)n | 7.11 | [chemical structure] |
| 43 | aHer2- (AL11a- LP1)n | 4 | [chemical structure] |
| 44 | FelD1- (AL11a- LP1)n | 4 | [chemical structure] |
| 45 | aHer2- (AL11a- LP13)n | 7.8 | [chemical structure] |
| 46 | FelD1- (AL11a- LP13)n | 7.3 | [chemical structure] |
| 47 | aHer2- (AL11a- LP15)n | 7.6 | [chemical structure] |
| 48 | FelD1- (AL11a- LP15)n | 7.0 | [chemical structure] |
| 49 | aHer2- (BL1- LP1)n | 7.7 | [chemical structure] |
| 50 | FelD1- (BL1- LP1)n | 7.6 | [chemical structure] |
| 51 | aHer2- (BL1- LP13)n | 14.88 | [chemical structure] |
| 52 | FelD1- (BL1- LP13)n | 15.00 | [chemical structure] |
| 53 | aHer2- (BL3b- LP1)n | 7.5 | [chemical structure] |
| 54 | FelD1- (BL3b- LP1)n | 7.1 | [chemical structure] |
| 55 | aHer2- (Mc- GGFG- DXD)n | 7.7 | [chemical structure] |
| 55-1 | aHer2- (Mc- GGFG- DXD)n | 7.7 | [chemical structure] |
| 55-2 | aHer2- (Mc- GGFG- DXD)n | 7.7 | [chemical structure] |
| 56 | FelD1- (Mc- GGFG- DXD)n | 7.5 | [chemical structure] |
| 56-1 | FelD1- (Mc- GGFG- DXD)n | 7.5 | [chemical structure] |
| 56-2 | FelD1- (Mc- GGFG- DXD)n | 7.5 | [chemical structure] |
| 57 | aHer2- (Mc- GGFG- DXD)n | 7.1 | [chemical structure] |
| 57-1 | aHer2- (Mc- GGFG- DXD)n | 7.1 | [chemical structure] |
| 57-2 | aHer2- (Mc- GGFG- DXD)n | 7.1 | [chemical structure] |
| 58 | FelD1- (Mc- GGFG- DXD)n | 7.0 | [chemical structure] |
| 58-1 | FelD1- (Mc- GGFG- DXD)n | 7.0 | [chemical structure] |
| 58-2 | FelD1- (Mc- GGFG- DXD)n | 7.0 | [chemical structure] |

### List of ADO OAR and MS, as Well Associated Handle and Linker-Payload

| ADC | | | | Handle | | Linker-payload | |
|---|---|---|---|---|---|---|---|
| # | Code# | DAR | ES-MS | Code# | MS of handle | code# | MS of LP |
| 1 | aHer2 Ab | | 145143 | / | / | / | / |
| 2 | FeID1 Ab | | 145452 | / | / | / | / |
| 3 | aHer2-(AL11a)n | 4 | 145951 | AL11a | 218.14 | / | / |
| 4 | FeID1-(AL11a)n | 4 | 146254 | AL11a | 218.14 | / | / |
| 5 | aHer2-(AL2a)n | 4 | 146626 | AL2a | 344.23 | / | / |
| 6 | FeID1-(AL2a)n | 4 | 146935 | AL2a | 344.23 | / | / |
| 7 | aHer2-(AL3a)n | 3.94 | 146722 | AL3a | 368.23 | / | / |
| 8 | FeID1-(AL3a)n | 4 | 147031 | AL3a | 368.23 | / | / |
| 9 | aHER2-(AL7)n | 3.93 | 145868 | AL7 | 201.10 | / | / |
| 10 | FeID1-(AL7)n | 3.92 | 146179 | AL7 | 201.10 | / | / |
| 11 | aHER2-(AL6)n | 3.6 | 145818 | AL6 | 187.09 | / | / |
| 12 | aHer2-(BL1)n | 3.9 | 147770 | BL1 | 674.34 | / | / |
| 13 | FeID1-(BL1)n | 3.9 | 148082 | BL1 | 674.34 | / | / |
| 14 | aHer2-(BL3b)n | 3.8 | 147915 | BL3b | 708.80 | / | / |
| 15 | FeID1-(BL3b)n | 3.8 | 148231 | BL3b | 708.80 | / | / |
| 16 | aHer2-(AL6-LP1)n | 3.6 | Reduced ESI-MS | AL6 | 187.09 | LP1 | 1395.64 |
| 17 | aHer2-(AL6-LP15)n | 6.2 | Reduced ESI-MS | AL6 | 187.09 | LP15 | 2435.05 |
| 18 | aHer2-(AL6-LP13)n | 6.5 | Reduced ESI-MS | AL6 | 187.09 | LP13 | 3067.35 |
| 19 | aHer2-(AL7-LP1)n | 3.7 | 151343 | AL7 | 201.10 | LP1 | 1395.64 |
| 20 | FeID1-(AL7-LP1)n | 3.9 | 151666 | AL7 | 201.10 | LP1 | 1395.64 |
| 21 | aHer2-(AL7-LP13)n | 7.3 | 158032 | AL7 | 201.10 | LP13 | 3067.35 |
| 22 | FeID1-(AL7-LP13)n | 7.3 | 158351 | AL7 | 201.10 | LP13 | 3067.35 |
| 23 | aHer2-(AL7-LP2)n | 3.83 | 151473 | AL7 | 201.10 | LP2 | 1425.65 |
| 24 | FeID1-(AL7-LP2)n | 3.80 | 151784 | AL7 | 201.10 | LP2 | 1425.65 |
| 25 | aHer2-(AL7-LP3)n | 3.88 | 151636 | AL7 | 201.10 | LP3 | 1466.68 |
| 26 | FeID1-(AL7-LP3)n | 3.82 | 151949 | AL7 | 201.10 | LP3 | 1466.68 |
| 27 | aHer2-(AL7-LP4)n | 3.84 | 151639 | AL7 | 201.10 | LP4 | 1467.66 |
| 28 | FeID1-(AL7-LP4)n | 3.82 | 151952 | AL7 | 201.10 | LP4 | 1467.66 |
| 29 | aHer2-(AL7-LP5)n | 3.80 | 151642 | AL7 | 201.10 | LP5 | 1466.71 |
| 30 | FeID1-(AL7-LP5)n | 3.69 | 151954 | AL7 | 201.10 | LP5 | 1466.71 |
| 31 | aHer2-(AL7-LP7)n | 3.70 | 151713 | AL7 | 201.10 | LP7 | 1485.69 |
| 32 | FeID1-(AL7-LP7)n | 3.68 | 152027 | AL7 | 201.10 | LP7 | 1485.69 |
| 33 | aHer2-(AL7-LP9)n | 3.81 | 151401 | AL7 | 201.10 | LP9 | 1409.66 |
| 34 | FeID1-(AL7-LP9)n | 3.89 | 151712 | AL7 | 201.10 | LP9 | 1409.66 |
| 35 | aHer2-(AL7-LP12)n | 3.82 | 152150 | AL7 | 201.10 | LP12 | 1595.76 |
| 36 | FeID1-(AL7-LP12)n | 3.83 | 152462 | AL7 | 201.10 | LP12 | 1595.76 |
| 37 | aHer2-(AL7-LP5D)n | 3.89 | 152152 | AL7 | 201.10 | LP5D | 1595.76 |
| 38 | aHer2-(AL7-LP5D)n | 3.90 | 152465 | AL7 | 201.10 | LP5D | 1595.76 |
| 39 | aHer2-(AL4c-LP1B)n | 3.49 | 151990 | AL4c | 356.23 | LP1B | 1402.60 |
| 40 | FeID1-(AL4c-LP1B)n | 3.45 | 152300 | AL4c | 356.23 | LP1B | 1402.60 |
| 41 | aHer2-(AL4c-LP13C)n | 7.07 | 158211 | AL4c | 356.23 | LP13C | 2956.25 |
| 42 | aHer2-(AL4c-LP13C)n | 7.11 | 158521 | AL4c | 356.23 | LP13C | 2956.25 |
| 43 | aHer2-(AL11a-LP1)n | 3.68 | 146502 | AL11a | 218.14 | LP1 | 1395.64 |
| 44 | FeID1-(AL11a-LP1)n | 4 | 151841 | AL11a | 218.14 | LP1 | 1395.64 |
| 45 | aHer2-(AL11a-LP13)n | 7.8 | 158223 | AL11a | 218.14 | LP13 | 3067.35 |
| 46 | FeID1-(AL11a-LP13)n | 7.3 | 158529 | AL11a | 218.14 | LP13 | 3067.35 |
| 47 | a Her2-(AL11a-LP15)n | 7.6 | 155695 | AL11a | 218.14 | LP15 | 2435.05 |
| 48 | FeID1-(AL11a-LP15)n | 7.0 | 155998 | AL11a | 218.14 | LP15 | 2435.05 |
| 49 | aHer2-(BL1-LP1)n | 7.7 | 158723 | BL1 | 674.34 | LP1 | 1395.64 |
| 50 | FeID1-(BL1-LP1)n | 7.6 | 159038 | BL1 | 674.34 | LP1 | 1395.64 |
| 51 | aHer2-(BL1-LP13)n | 14.88 | 172107 | BL1 | 674.34 | LP13 | 3067.35 |
| 52 | FeID1-(BL1-LP13)n | 15.00 | 172419 | BL1 | 674.34 | LP13 | 3067.35 |
| 53 | aHer2-(BL3b-LP1)n | 7.5 | 159093 | BL3b | 708.80 | LP1 | 1395.64 |
| 54 | FeID1-(BL3b-LP1)n | 7.1 | 159398 | BL3b | 708.80 | LP1 | 1395.64 |
| 55 | aHer2-(Mc-GGFG-DXD)n | 7.7 | Reduced ESI-MS | / | | / | |
| | (SEQ ID NO: 2130) | | | | | | |
| 56 | FeID1-(Mc-GGFG-DXD)n | 7.5 | Reduced ESI-MS | / | | / | |
| | (SEQ ID NO: 2133) | | | | | | |
| 57 | aHer2-(Mc-GGFG-DXD)n | 7.1 | Reduced ESI-MS | / | | / | |
| | (SEQ ID NO: 2136) | | | | | | |
| 58 | FeID1-(Mc-GGFG-DXD)n | 7.0 | Reduced ESI-MS | / | | / | |
| | (SEQ ID NO: 2139) | | | | | | |
| 59 | DS8201a | 7.8 | | | | | |

### Characterization of ADCs

### SDS-PAGE for Analysis of ADC Integrity and Purity

[1071] In one method, SDS-PAGE running conditions include non-reduced and reduced samples (1-2pg) along with Precision Plus Protein Dual Color Standards (Bio-rad, 500 μl, Cat #1610374) are loaded per lane in (1.0 mm×10 well) Novex 4-20% No Tris-Glycine Gel and is run at 180V, 300 mA, for 80 minutes. A non-reduced sample is prepared using NuPAGE® LDS Sample Buffer (4×) (Thermo Fisher Scientific, Cat #1887691) and the reduced sample is prepared with SDS sample buffer (4×) containing 10% sample reducing agent (10×) (Thermo Fisher Scientific, Cat #1769410).

[1072] Molecular weights of the antibodies and ADCs on SDS-PAGE are determined under non-reducing and reducing conditions. The mass shifts may not be obvious under non-reducing conditions due to relatively small percentages of mass changes. However, the masses of the heavy chains are increased from the naked antibodies to the azido-functionalized antibodies, and further to the ADC conjugates.

### Size Exclusion Chrmoatography (SEC) for ADC Analysis and Purification

[1073] To determine the purity of antibody drug conjugates, size exclusion chromatography is performed. Analytical SEC experiments are run using a Thermo UltiMate™ 3000 instrument, on a XBridge Protein BEH SEC Column (Waters, 200 Å, 3.5 μm, 7.8 mm×300 mm), and each sample (30-40 μg, 20 μL) are run at flow rate of 0.5 mL/min using PBS pH 7.4 with 15% 2-propanol and monitored at λ280 nm using Thermo DAD-3000 RS Rapid Separation Diode Array Detector.

[1074] ADCs are purified by Size Exclusion Chromatography (SEC) and concentrated by using ultra centrifugation. To separate the antibody drug conjugates from the reaction mixture, preparative SEC purifications are performed using the ÄKTA instrument from GE Healthcare, on a Superdex® 200 increase 10/300 GL (1.0×30 cm) column, at the flow rate of 0.6 mL/min eluting with BupH at pH 7.4, and monitored at λ280 nm. To concentrate the product Amicon @ Ultra-4 Centrifugal Filters (Ultracel-10K) are used in Allegra x-12r centrifuge and the solution is stirred after each concentration to avoid high aggregation.

### LC-ESI-MS for Intact Mass Analysis of Antibody and ADC

[1075] Measurement of intact mass for the ADC samples by LC-ESI-MS was performed to determine payload distribution profile and to calculate the average DAR. Each testing sample (0.5-1 μg) was loaded onto Waters Protein BEH C4 Column (300 Å, 1.7 μm, 2.1 mm×50 mm; Cat No. 186004495) with different gradients of the Mobile Phase A (ddH2O with 0.1% FA) and Mobile Phase B (ACN with 0.1% FA) (as shown in the table below), at the flow rate of 0.25 μL/min, and monitored at λ280 nm. Then the product was eluted, and the mass spectra was acquired by Thermo Q EXACTIVE HF-X.

| No. | Time (min) | Flow (μL/min) | % B | Curve |
|---|---|---|---|---|
| 1 | 0.000 | Equilibration | | |
| 2 | 0.000 | 0.250 | 10.0 | 5 |
| 3 | New Row | | | |
| 4 | 0.000 | Run | | |
| 5 | 0.000 | 0.250 | 10.0 | 5 |
| 6 | 3.000 | 0.250 | 10.0 | 5 |
| 7 | 7.000 | 0.250 | 90.0 | 5 |
| 8 | 8.000 | 0.250 | 90.0 | 5 |
| 9 | 8.100 | 0.250 | 10.0 | 5 |
| 10 | 10.000 | 0.250 | 10.0 | 5 |
| 11 | New Row | | | |

| | | |
|---|---|---|
| 12 | 10.000 | Stop Run |

### Example 28. In Vitro Cell Based Assays and Results

[1076] The EC50 values for the ADCs and control ADCs, as well the free payload (DXD and Gly-NH2-CH2DXD) are summarized in Table 11, below. The anti-Her2 viability assay protocol is following.

### Materials

[1077] 96 well, BioCoat cellware, poly-D-lysine, white, opaque bottom [Thermo #136101]. 96 well deep well plates, 1.1 mL round wells [Axygen Scientific, cat #P-DW-11-C-S, VWR #47734-788]—large volume dilution plate. Corning 75 cm2 flask [Corning cat #430641U]. Reagent reservoirs, 50 mL, white, individually wrapped [VWR, cat #89094-682]. Reagent reservoirs, 25 mL, white, polystyrene, 5/bag [VWR, cat #89094-662]. Centrifuge conical tube, PP, 50 mL [Corning, cat #352098]. Centrifuge conical tube, PP, 15 mL [Corning, cat #352097]. Envision plate reader [Perkin Elmer Model #2104]. Top Seal A Plus [Perkin Elmer, cat #6050185]. McCoy's Medium 5A [Irvine Scientific, cat #9090]. DME High Glucose [Irvine Scientific, cat #9033]. MEM Earle's Salts, [Irvine Scientific, cat #9126]. RPMI medium 1640 [Irvine Scientific, cat #9160]. Penicillin-Streptomycin L-glutamine Solution 100× [ThermoFisher Scientific, cat #10378016]. PBS 1× without calcium and magnesium salts [Irvine Scientific, cat #9240]. Trypsin-EDTA, 0.025% Trypsin & 0.75 mM EDTA (1×), w/o Ca2+& Mg2+[Millipore, cat #SM-2004-C]. Fetal Bovine Serum [Saradigm, cat #1500-500]. DMSO Dimethyl sulfoxide, cell culture tested [ATCC, cat #4-X]. CellTiter-Glo 2.0 [Promega, cat #G9243]. Bovine serum albumin solution, protease free [Sigma, cat #A8577]. Opti-MEM reduced serum media [Gibco, cat #31985-070].

### Preparation of the Assay Media

[1078] 0.1% BSA was added to the Opti-MEM reduced serum media [Gibco, cat #31985-070]. This assay media was used for the dilution of ADC and free drug.

### Procedures

[1079] Cells were seeded in their growth media into 96 well plates (Thermo #136101) one day prior to adding ADCs: 1000/well SKBR3 cells in 80 uL media (target positive cells), 1000/well NCI-N87 cells in 80 uL media (target positive cells), 1000/well Calu-3 in 80 uL media (target positive cells), and 800/well NCI-H1975 cells in 80ul media (target negative cells).

[1080] Serial dilutions of free drug in 100% DMSO (1:4 10 pts starting from 100 uM) were prepared. Serially diluted payload was transferred into Opti-Mem with 0.1% BSA (10 uL into 990 uL media). Serial dilutions of ADCs/isotype controls at 1:4 in Opti-Mem with 0.1% BSA (starting from 5×1000 nM) were prepared. 20ul assay media diluted ADC/isotype conjugates as well as free drug were transferred to above cells. The plates were incubated at 37° C., 5% CO₂ for 6 days. Plates were developed by adding 100ul CellTiter Glo 2.0. RT 5-10 min. Plates were read with Envision plate reader. Data was analyzed using Prism. Only inner 60 well are used for the assay. The edge wells were filled with media to prevent dry out.

### SKBR3 Cell-Based Assay

[1081] The cell line used in the anti-proliferation assays was SK-BR-3, a human breast, adenocarcinoma (pleural effusion) cell line; The cells were grown in McCoy's 5a Medium+10% FBS. To run the assay, the cells (80 μl, 1000 cells) were added to each well in a 96-well plate and incubated for 24 hours at 37° C. with CO₂. Next, the cells were treated with test compounds (20 μl) at various concentrations in appropriate cell culture medium (total volume, 0.1 mL). The control wells contain cells and the medium but lack the test compounds. The plates were incubated for 144 hours at 37° C. with CO₂. CTG reagent was then added to the wells (100 μl). After the plates were shaken for 10 min and then incubated for 10 min at room temperature, paste the clear bottom with white back seal and record luminescence with Envision. The inhibition % was calculated according to the following equation: inhibition %=[1-(assay-blank)/(control-blank)]×100.

TABLE 11
List of ADCs and Payloads in vitro Cell Killing Activity

| | | | SKBR3 | | N87 | | Calu-3 | | JIMT-1 | | H1975 | |
|---|---|---|---|---|---|---|---|---|---|---|---|---|
| | | | IC50 | % | | % | IC50 | % | IC50 | % | IC50 | % |
| # | ADC# | DAR | (nM) | Kill | IC50 (nM) | Kill | (nM) | Kill | (nM) | Kill | (nM) | Kill |
| | DXd | | 1.02 | 97.0 | 2.59 | 98.6 | 1.30 | 94.9 | 4.41 | 94.5 | 3.45 | 99.3 |
| 59 | DS8201a | 7.7 | 0.197 | 92.9 | 1.07 | 98.6 | 0.301 | 94.5 | 306 | 83.6 | 263 | 80.4 |
| | Cont. | 7.5 | 95.3 | 88.0 | 168.00 | 83.4 | 157 | 87.9 | >400 | 44.7 | 689 | 51.6 |
| | DS8201a | | | | | | | | | | | |
| | P1 | / | 5.81 | 96.0 | 9.25 | 98.0 | 6.78 | 93.1 | 26.6 | 89.8 | 23.9 | 96.4 |
| 19 | aHer2- | 3.7 | 0.114 | 91.9 | 1.17 | 94.4 | 0.256 | 92.9 | 248 | 51.7 | 322 | 57.0 |
| | (AL7- | | | | | | | | | | | |
| | LP1)₄ | | | | | | | | | | | |
| 20 | FeID1- | 3.9 | 156 | 84.1 | 273.30 | 59.7 | >400 | 83.1 | >400 | 31.6 | >400 | 33.6 |
| | (AL7- | | | | | | | | | | | |
| | LP1)₄ | | | | | | | | | | | |
| 49 | aHer2- | 7.7 | 0.160 | 92.1 | 0.682 | 97.9 | 0.282 | 92.8 | >400 | 47.4 | 366 | 50.6 |
| | (BL1- | | | | | | | | | | | |
| | (LP1)₂)₄ | | | | | | | | | | | |
| 50 | FeID1- | 7.6 | 89.1 | 88.5 | 210 | 75.3 | 142 | 89.8 | >400 | 49.0 | 331 | 56.2 |
| | (BL1- | | | | | | | | | | | |
| | (LP1)₂)₄ | | | | | | | | | | | |
| 43 | aHer2- | 3.68 | 0.152 | 90.1 | 0.594 | 89.4 | 0.293 | 91.6 | >400 | 16.4 | >400 | 12.6 |
| | (AL11a- | | | | | | | | | | | |
| | LP1)₄ | | | | | | | | | | | |
| 44 | FeID1- | 4.00 | >400 | 26.6 | >400 | 15.3 | >400 | 31.7 | >400 | 14.9 | >400 | 4.0 |
| | (AL11a- | | | | | | | | | | | |
| | LP1)₄ | | | | | | | | | | | |
| 21 | aHer2- | 7.3 | 0.123 | 90.8 | 0.648 | 94.9 | 0.216 | 91.2 | >400 | 9.3 | >400 | 7.9 |
| | (AL7- | | | | | | | | | | | |
| | LP13)n | | | | | | | | | | | |
| 22 | FeID1- | 7.3 | >400 | 12.5 | >400 | 11.1 | >400 | 25.6 | >400 | 7.8 | >400 | 1.7 |
| | (AL7- | | | | | | | | | | | |
| | LP13)n | | | | | | | | | | | |
| 45 | aHer2- | 7.8 | 0.151 | 91.7 | 0.607 | 95.6 | 0.262 | 91.5 | >400 | 14.7 | >400 | 8.3 |
| | (AL11a- | | | | | | | | | | | |
| | LP13)n | | | | | | | | | | | |
| 46 | FeID1- | 7.3 | >400 | 9.4 | >400 | 4.8 | >400 | 15.9 | >400 | 10.4 | >400 | 4.1 |
| | (AL11a- | | | | | | | | | | | |
| | LP13)n | | | | | | | | | | | |
| 39 | aHer2- | 3.49 | 0.256 | 86.6 | 10.4 | 72.0 | 1.83 | 80.4 | >400 | 12.3 | >400 | 11.5 |
| | (AL4c- | | | | | | | | | | | |
| | LP1B)n | | | | | | | | | | | |
| 40 | FeID1- | 3.45 | 11.4 | 91.5 | 71.5 | 96.0 | 25.1 | 92.5 | 252 | 63.5 | 263 | 68.0 |
| | (AL4c- | | | | | | | | | | | |
| | LP1B)n | | | | | | | | | | | |
| 41 | aHer2- | 7.07 | 0.106 | 92.1 | 0.638 | 91.2 | 0.241 | 90.0 | >400 | 9.6 | >400 | 9.7 |
| | (AL4c- | | | | | | | | | | | |
| | LP13C)n | | | | | | | | | | | |
| 42 | aHer2- | 7.11 | 13.3 | 90.5 | 49.3 | 85.6 | 24.6 | 88.6 | >400 | 18.3 | >400 | 7.9 |
| | (AL4c- | | | | | | | | | | | |
| | LP13C)n | | | | | | | | | | | |
| | P2 | / | 5.89 | 97.0 | 8.93 | 98.4 | 5.68 | 93.2 | 23.8 | 92.7 | 19.9 | 98.0 |
| 23 | aHer2- | 3.83 | 0.164 | 92.8 | 1.71 | 97.8 | 0.265 | 93.8 | 192 | 68.5 | 223 | 72.1 |
| | (AL7- | | | | | | | | | | | |
| | LP2)₄ | | | | | | | | | | | |
| 24 | FeID1- | 3.80 | 47.8 | 91.0 | 147.40 | 89.5 | 70.4 | 90.8 | 183 | 64.5 | 233 | 71.4 |
| | (AL7- | | | | | | | | | | | |
| | LP2)₄ | | | | | | | | | | | |
| | P3 | / | 11.6 | 94.3 | 30.4 | 95.5 | 15.9 | 90.7 | 88.6 | 81.3 | 54.5 | 88.5 |
| 25 | aHer2- | 3.88 | 0.172 | 88.4 | 4.73 | 80.6 | 0.31 | 88.4 | >400 | 9.7 | >400 | 5.3 |
| | (AL7- | | | | | | | | | | | |
| | LP3)₄ | | | | | | | | | | | |
| 26 | FeID1- | 3.82 | 121 | 85.7 | >400 | 45.6 | 341 | 73.9 | >400 | 8.9 | >400 | 7.2 |
| | (AL7- | | | | | | | | | | | |
| | LP3)₄ | | | | | | | | | | | |
| | P4 | / | 6.63 | 96.6 | 9.84 | 97.7 | 5.67 | 93.7 | 20.7 | 92.0 | 24.1 | 96.8 |
| 27 | aHer2- | 3.84 | 0.186 | 90.3 | 2.07 | 87.5 | 0.222 | 91.9 | >400 | 22.0 | >400 | 10.9 |
| | (AL7- | | | | | | | | | | | |
| | LP4)₄ | | | | | | | | | | | |
| 28 | FeID1- | 3.82 | 212 | 57.7 | >400 | 24.8 | >400 | 38.9 | >400 | 15.5 | >400 | 8.4 |
| | (AL7- | | | | | | | | | | | |
| | LP4)₄ | | | | | | | | | | | |
| | P5 | / | 4.51 | | | | | | | | | |
| 29 | aHer2- | 3.80 | 0.216 | 90.6 | 2.19 | 91.7 | 0.327 | 90.7 | >400 | 34.1 | >400 | 24.7 |
| | (AL7- | | | | | | | | | | | |
| | LP5)₄ | | | | | | | | | | | |
| 30 | FeID1- | 3.69 | 204 | 79.9 | >400 | 41.9 | 178 | 75.3 | >400 | 30.1 | >400 | 19.5 |
| | (AL7- | | | | | | | | | | | |
| | LP5)₄ | | | | | | | | | | | |
| 37 | aHer2- | 3.89 | 0.139 | 93.0 | 1.46 | 98.2 | 0.190 | 94.0 | 218 | 84.8 | 209 | 83.1 |
| | (AL7- | | | | | | | | | | | |
| | LP5D)₄ | | | | | | | | | | | |
| 38 | FeID1- | 3.90 | 88.2 | 87.7 | 169 | 82.3 | 95.3 | 89.0 | 315 | 57.0 | 280 | 66.7 |
| | (AL7- | | | | | | | | | | | |
| | LP5D)₄ | | | | | | | | | | | |
| 35 | aHer2- | 3.82 | 0.210 | 90.7 | 3.14 | 95.0 | 0.302 | 92.2 | >400 | 46.3 | 355 | 52.1 |
| | (AL7- | | | | | | | | | | | |
| | LP12)₄ | | | | | | | | | | | |
| 36 | FeID1- | 3.83 | 184 | 81.7 | >400 | 44.2 | 121 | 73.8 | >400 | 27.3 | >400 | 21.7 |
| | (AL7- | | | | | | | | | | | |
| | LP12)₄ | | | | | | | | | | | |
| | P7 | / | 1.98 | 97.0 | 4.41 | 98.6 | 3.32 | 93.7 | 13.2 | 93.4 | 8.96 | 98.8 |
| 31 | aHer2- | 3.70 | 0.303 | 95.1 | 2.04 | 99.0 | 0.581 | 94.1 | 158 | 90.1 | 81.6 | 90.8 |
| | (AL7- | | | | | | | | | | | |
| | LP7)₄ | | | | | | | | | | | |
| 32 | FeID1- | 3.68 | 21.1 | 94.0 | 51.69 | 96.4 | 31.5 | 92.8 | 127 | 86.0 | 109 | 86.0 |
| | (AL7- | | | | | | | | | | | |
| | LP7)₄ | | | | | | | | | | | |
| | P9 | / | 69.50 | | | | | | | | | |
| 33 | aHer2- | 3.81 | 0.14 | 91.6 | 0.82 | 92.1 | 0.661 | 83.7 | >400 | 10.3 | >400 | 14.9 |
| | (AL7- | | | | | | | | | | | |
| | LP9)₄ | | | | | | | | | | | |
| 34 | FeID1- | 3.89 | 33.1 | 88.4 | 85.56 | 81.7 | 47.7 | 90.6 | >400 | 20.6 | >400 | 20.3 |
| | (AL7- | | | | | | | | | | | |
| | LP9)₄ | | | | | | | | | | | |

[1082] Metabolic studies of a drug candidate shed lights on the pharmacological and pharmacokinetic pathways. It may also provide essential information on drug safety and its potential toxicity, in addition to its in vivo and clinical efficacy.

[1083] In vitro stability of Linker-Prodrug in mouse whole blood Scheme 15. Metabolism of LP1 (M2980) in whole blood.

[chemical structure]

### Assay Protocol of Whole Blood Stability Test

[1084] Stock solution of test compound was provided in 100% DMSO. The stock solution for each compound was diluted into 500 μM with mixture of 50% acetonitrile, then diluted into mouse blood to achieve a final concentration of 1.0 μM. 1.0 μM of test compound in duplicate was incubated in blood at 37° C. Aliquots of 50 uL sample was collected at 0, 15, 30, 60, 120, 240, 480 min, and 24 hours. Reactions were terminated at various time points (0, 15, 30, 60, 120, 240, 480 min, 24 hours) by adding 200 μL of ice-cold acetonitrile containing internal standard with 1% formic acid and then ultrasound for 30 seconds. Plate was centrifuged (4000 rpm, 15 min). 50 μL of supernatants were transferred into a daughter plate containing 200 μL of H₂O in each well. The samples were mixed well and analyzed with UPLC-MS/MS.

### LC-MS/MS Analysis

[1085] A Waters liquid chromatographic system was used. Detection was performed on AP14000 Q-Trap and AP15500 mass spectrometer equipped with TurbolonSpray (ESI) Interface (Applied Biosystems, Concord, Ontario, Canada). Analyst 1.5 and 1.6.2 software packages (Applied Biosystems) were used to control the LC-MS/MS system, as well as for data acquisition and processing.

[1086] Chromatographic separation was achieved on the Wates BEH C18 column (50*2.1 mm ID, 1.7 μm). The column temperature was maintained at ambient temperature (25° C.). The flow rate was maintained at 0.6 mL/min and the following mobile phases were used: water (0.1% formic acid, v/v) (phase A) and acetonitrile (0.1% formic acid, v/v) (phase B). LC-MS conditions are shown in Table 12 below.

TABLE 12
LC-MS Conditions

| Time | A % | B % |
|---|---|---|
| Initial | 95 | 5 |
| 1.20 | 20 | 80 |
| 1.40 | 20 | 80 |
| 1.41 | 95 | 5 |
| 1.60 | 95 | 5 |

[1087] Test compounds (1.0 μM) were incubated in blood at 37° C. in duplicate. Aliquots of 50 uL sample was collected at 0, 15, 30, 60, 120, 240, 480 min, and 24 hours. Reactions were terminated at various time points (0, 15, 30, 60, 120, 240, 480 min, 24 hours by adding 200 μL of ice-cold acetonitrile containing internal standard with 1% formic acid, then ultrasound for 30 seconds. The plate was centrifuged (4000 rpm, 15 min). 50 μL of supernatants were transferred into a daughter plate containing 200 μL of water in each well. Samples were mixed well and analyzed with UPLC-MS/MS.

TABLE 13
Test Results of LP1 (M2980) Stability in Whole Bood

| | | | | | | ProDXd |
|---|---|---|---|---|---|---|
| | | | | ProDXd | DXd | released + |
| | | | | released | released | DXd |
| Time | | | | from | from | released + |
| (hr) | DXd | ProDXd | M2980 | M2980 | M2980 | M2980 |
| 0 | 100.0% | 100.0% | 100.0% | 1.8% | 3.0% | 104.8% |
| 0.25 | 95.9% | 63.9% | 88.8% | 4.9% | 3.7% | 97.4% |
| 0.5 | 103.6% | 39.0% | 82.6% | 8.6% | 4.0% | 95.2% |
| 1 | 111.9% | 30.7% | 72.3% | 22.1% | 8.6% | 103.0% |
| 2 | 97.6% | 14.8% | 52.8% | 32.3% | 22.7% | 107.8% |
| 4 | 94.8% | 2.7% | 30.5% | 33.1% | 43.2% | 106.8% |
| 8 | 94.2% | 0.3% | 16.5% | 31.6% | 74.9% | 123.0% |
| 24 | 94.2% | 0.0% | 0.0% | 4.0% | 80.1% | 84.0% |

The % was calculated based on initial 1 uM as 100% and the standard concentration curve.

[1088] The result indicated M2980 (LP1) is metabolized to ProDXD, and then to DXd, which provides its unique pharmacokinetic and pharmacodynamic properties, which contributes to, at least partially, and result in its superior in vivo efficacy.

[1089] The therapeutic molecules as disclosed herein could be considered as a double prodrug approach. ADC is a prodrug of its payload, most commonly a cytotoxic agent, and a prodrug of DXd (ProDXd) was designed for conjugation to an antibody as an ADC payload. As it was schematically shown in FIG. 8, a specifically built-in cathepsin B cleavable linker in our ADC molecule was cleaved by cathepsin B to release ProDXd in lysosome. ProDXd is slowly metabolized to DXd in targeting cell—Cytoplasm; both DXd and ProDXd demonstrate Bystander effect in TME (tumor micro-environment). ProDXd has Lower pGP and BCRP efflux rates than DXd that reduced Cmax of DXD in circulation that reduced in vivo toxicity related to the payload. This double prodrug-payload releasing mechanism resulted in further improvement of the tolerability and safety and increase therapeutic index or therapeutic window.

[1090] To mimicry the LP1 (M2980) in a conjugated molecule, model compound M3385 was prepared using the straightforward Click chemistry as shown the scheme below:

[chemical structure]

### Model M3385 Metabolism Studies Using Hepatocytes, Liver Microsomes or Liver S9, the Soluble Fractions of Homogenate of Hepatocytes.

[1091] FIG. 9 shows the schematic process for the preparation of the liver S9 and the liver microsomes from hepatocytes. Briefly, hepatocytes are complete liver cells, containing various first-phase and second-phase enzymes that can mediate various metabolic reactions; therefore, it is a better in vitro model to test metabolites. Liver S9 is the supernatant obtained by grinding and centrifuging the liver cells. The enzymes content is lower compared to Hepatocytes. It mainly contains CYP enzymes and some biphasic enzymes (but no biphasic coenzyme), so additional coenzyme (NADPH and UDPGA, etc.) is needed to mediate the biphasic reaction.

[1092] Liver microsomes are the lower part obtained by grinding and centrifuging the liver cells and mainly mediate a phase reaction. Because the cell membrane is destroyed, the test-compound has no limitation to pass through the cell membrane and is directly exposed to the liver enzymes that are also in liver microsome and S9 (Fonsi et al., “High-Throughput Microsomal Stability Assay for Screening New Chemical Entities in Drug Discovery,” Journal of Biomolecular Screening 13(9):862-869 (2008), which is incorporated by reference herein in its entirety).

[1093] The metabolism of model compound M3385 was evaluated in human liver S9 with NADPH and UDPGA as follows:

[1094] Assay buffer: 100 mM potassium phosphate buffer (K+/Mg2+ buffer, pH7.4):

| | K₂HPO₄•3H₂O | KH₂PO₄ | MgCl₂•6H₂O | |
|---|---|---|---|---|
| | (g) | (g) | (g) | dH₂O |
| Reagent | FW: 228.22 | FW: 136.09 | FW: 203.3 | (mL) |
| 100 mM | 9.243 | 1.298 | 0.511 | 500 |

### Preparation of Cofactor Solution in the K+/Mg2+ Buffer:

| | NADPH | UDPGA | K⁺/Mg²⁺ | Total |
|---|---|---|---|---|
| | (MW: 833.4) | (MW: 646.2) | Buffer | volume |
| Cofactor solution | (mg) | (mg) | (mL) | (mL) |
| 8 mM NADPH | 14.24 | — | 2.136 | 2.136 |
| 20 mM UDPGA | — | 26 | 2.012 | 2.012 |

[1096] The initial stock of liver S9 was diluted in K+/Mg²⁺ buffer, pH 7.4 from 20 mg/ml to 2× Liver S9 (2 mg/mL) with alamethicin (50 μg/mL):

| Buffer | liver microsome | Alamethicin | Total |
|---|---|---|---|
| (μL) | (μL) | (10 mg/mL, μL) | (μL) |
| 4117 | 460 | 23 | 4600 |

### Assay Procedure:

[1097] 2×LS9/compound M3385 solution was prepared.

[1098] Time zero/T0: 199 μL 2 mg/mL liver S9 solution; 100 μL of 8 mM NADPH solution; 100 μL of 20 mM UDPGA solution; and 1200 μL of ACN were added, vortexed at 1000 rpm for 5 min, then 1 μL of 4 mM test compound solution was added.

[1099] T240 with a co-factor: 199 μL 2 mg/mL liver S9 solution; 100 μL of 8 mM NADPH solution; and 100 μL of 20 mM UDPGA solution were added. The T240 sample was prewarmed at 37° C. for 5 min and 1 μL of 4 mM test compound solution was added. After 240 min incubation, 1200 μL of ACN was added and then vortexed at 1000 rpm for 5 min.

[1100] T240-without a co-factor: 199 μL 2 mg/mL liver S9 solution and 200 μL of buffer were added. The T240-w/o sample was prewarmed at 37° C. for 5 min and 1 μL of 4 mM test compound solution was added. After 240 min incubation, 1200 μL of ACN was added and then vortexed at 1000 rpm for 5 min.

[1101] Protein precipitation: quenched samples were centrifuged at 14000 rpm for 5 min.

[1102] Sample preparation: an aliquot of 1200 μL of the supernatant was evaporated under N2 stream until dry. Dried extracts were reconstituted with 200 μL of 25% aqueous ACN, vortexed for 2 minutes, centrifuged at 14000 rpm for 5 min, and then 3 μL of reconstituted supernatant were injected for LC-UV-MS analysis.

[1103] Results. Metabolite profiling of M3385 in human liver S9 with or without two different cofactors NADPH and UDPGA (Fonsi et al., “High-Throughput Microsomal Stability Assay for Screening New Chemical Entities in Drug Discovery,” Journal of Biomolecular Screening 13(9):862-869 (2008), which is incorporated by reference herein in its entirety) showed that 88.6% of M3385 was still intact after 4 hours incubation. No EXT (payload) but 3.9% ProDXd and 3.5% DXd were detected (including both E-ring open and close forms as shown in Schemes 17-19).

[1104] A summary, including observed m/z value, retention time and MS peak area of model compound M3385 and its metabolites in human liver S9 with NADPH and UDPGA are presented in Tables 14 and 15 below.

[chemical structure]

[chemical structure]

[chemical structure]

TABLE 14
M3385 Metabolism in Human Liver S9 with cofactors NADPH and UDPGA (240 min)

| | | | | Human Liver S9 with NADPH | | |
|---|---|---|---|---|---|---|
| | | | | and UDPGA (240 min) | | |
| | | | | Relative UV | | |
| | | | R.T. | Abundance* | | MS peak |
| Peak ID | Found m/z | Biotransformation | (min) | (%) | | area |
| Parent(T240) | 1614.7884[M + H]⁺ | E-ring close form | 5.66 | 82.43% | 88.62% | 1.01E+06 |
| M3385 | 807.8961[M + 2H]²⁺ | | | | M3385 | 8.70E+06 |
| | 1612.7701[M − H]⁻ | | | | | 4.19E+05 |
| M3385R (E- | 816.9016[M + 2H]²⁺ | Hydroxylation + | 5.60 | 6.19% | | 2.02E+05 |
| ring open) | 1630.7828[M − H]⁻ | Hydrogenation | 5.60 | | | 1.10E+05 |
| | | E-ring open form | | | | |
| ML1 | 1023.5715[M + H]⁺ | Ester Hydrolysis + | 4.51 | + | + | 1.65E+04 |
| | | Hydroxylation + | | | | |
| | | Desaturation | | | | |
| MP1 | 580.2186[M + H]⁺ | Amide Hydrolysis | 4.56 | 2.70% | 3.94% | 2.45E+05 |
| MP1R | 598.2317[M + H]⁺ | E-ring open form | 4.61 | 0.29% | ProDXd | 3.98E+04 |
| | | from MP1 | | | | |
| MP4 | 534.2162[M − H]⁻ | MP1 + (—CO2) | 4.62 | 0.95% | | 1.31E+05 |
| MP3 | 550.2102[M − H]⁻ | MP1 + (—CO) | 4.63 | + | | 2.44E+04 |
| ML2 | + 1139.6295[M + H]⁺ | O-Dealkylation | 4.34 | + | + | 1.17E+05 |
| MP2 | 494.1710[M + H]⁺ | O-Dealkylation | 5.39 | 2.88% | 3.45% | 5.97E+05 |
| | | (DXd) | | | Dxd | |
| MP2R | 512.1829[M + H]⁺ | (E-ring open form | 5.19 | 0.14% | | 1.39E+04 |
| | | from DXd) | | | | |
| MP5 | 512.1816[M + H]⁺ | MP2 + | 4.61 | 0.43% | | 5.84E+04 |
| | | Hydroxylation + | | | | |
| | | Hydrogenation | | | | |
| ML3 | 1195.6258[M − H]⁻ | Amide Hydrolysis | 4.43 | + | + | 7.26E+03 |

TABLE 15
M3385 Metabolism in Human Liver S9 Without Cofactors NADPH and UDPGA
(240 min)

| | | | | Human Liver S9 without NADPH | | |
|---|---|---|---|---|---|---|
| | | | | and UDPGA (240 min) | | |
| | | | R.T. | Relative UV | | MS peak |
| Peak ID | Found m/z | Biotransformation | (min) | Abundance* (%) | | area |
| Parent(T240) | 1614.7884[M + H]⁺ | E-ring close form | 5.66 | 81.67% | 90.84% | 9.02E+05 |
| M3385 | 807.8961[M + 2H]²⁺ | | | | | 8.79E+06 |
| | 1612.7701[M − H]⁻ | | | | | 4.64E+05 |
| M3385R (E- | 816.9016[M + 2H]²⁺ | Hydroxylation + | 5.60 | 9.17% | | 3.39E+05 |
| ring open) | 1630.7828[M − H]⁻ | Hydrogenation | 5.60 | | | 1.87E+05 |
| | | E-ring open form | | | | |
| ML1 | 1023.5715[M + H]⁺ | Ester Hydrolysis + | 4.51 | + | + | 2.23E+04 |
| | | Hydroxylation + | | | | |
| | | Desaturation | | | | |
| MP1 | 580.2186[M + H]⁺ | Amide Hydrolysis | 4.56 | 3.17% | 4.93% | 3.00E+05 |
| MP1R | 598.2317[M + H]⁺ | E-ring open form | 4.61 | 0.38% | | 5.08E+04 |
| | | from MP1 | | | | |
| MP4 | 534.2162[M − H]⁻ | MP1 + (—CO2) | 4.62 | 1.38% | | 1.81E+05 |
| MP3 | 550.2102[M − H]⁻ | MP1 + (—CO) | 4.63 | + | | 3.45E+04 |
| ML2 | 1139.6295[M + H]⁺ | O-Dealkylation | 4.34 | + | + | 1.21E+05 |
| MP2 | 494.1710[M + H]⁺ | O-Dealkylation | 5.39 | 3.31% | | 7.60E+05 |
| | | (DXd) | | | | |
| MP2R | 512.1829[M + H]⁺ | (E-ring open form | 5.19 | 0.18% | 4.05% | 2.48E+04 |
| | | from DXd) | | | | |
| MP5 | 512.1816[M + H]⁺ | MP2 + | 4.61 | 0.56% | | 7.28E+04 |
| | | Hydroxylation + | | | | |
| | | Hydrogenation | | | | |
| ML3 | 1195.6258[M − H]⁻ | Amide Hydrolysis | 4.43 | + | + | 7.41E+03 |

[1105] As various changes can be made in the above-described subject matter without departing from the scope and spirit of the present invention, it is intended that all subject matter contained in the above description, or defined in the appended claims, be interpreted as descriptive and illustrative of the present invention. Many modifications and variations of the present invention are possible in light of the above teachings. Accordingly, the present description is intended to embrace all such alternatives, modifications, and variances which fall within the scope of the appended claims.

[1106] All patents, applications, publications, test methods, literature, and other materials cited herein are hereby incorporated by reference in their entirety as if physically present in this specification.

1.-99. (canceled)

100. An antibody-drug conjugate comprising an antibody or an antigen-binding fragment thereof conjugated to a compound having Formula (I) [chemical structure]
or a pharmaceutically acceptable salt thereof,
wherein R¹, R², R³, and R⁴ are independently hydrogen, a C₁₋₅ alkyl, or aryl;
AA is a natural or a nonnatural amino acid;
p is an integer from 1 to 6, and [chemical structure]
indicates the point of attachment to the antibody or the antigen-binding fragment thereof, directly or via a linker.

101. The antibody-drug conjugate according to claim 100, wherein said compound of Formula (I) comprises

[chemical structure]

[chemical structure]

[chemical structure]

102. The antibody-drug conjugate according to claim 100, wherein said antibody or said antigen-binding fragment thereof is conjugated to a compound having a structure according to Formula (II) [chemical structure]
or a pharmaceutically acceptable salt thereof, wherein R¹, R², R³, and R⁴ are independently hydrogen or a C₁₋₅ alkyl;
A is a Click chemistry adduct;
W is NH, O, CO, CH₂, a phenyl, or a combination of two or more thereof,
AA is a natural or a nonnatural amino acid;
m is an integer from 0 to 8;
n is 0 or 1;
p is an integer from 1 to 6, and [chemical structure]
indicates the point of attachment to the antibody or the antigen-binding fragment thereof, directly or via a linker.

103. The antibody-drug conjugate according to claim 102, wherein the click chemistry adduct is a product of a copper-free click chemistry reaction selected from: (a) strain-promoted azide/dibenzocyclooctyne-amine (DBCO) click chemistry; (b) inverse electron demand Diels-Alder (IED-DA) tetrazine/trans-cyclooctene (TCO) click chemistry; (c) inverse electron demand Diels-Alder (IED-DA) tetrazine/norbonene click chemistry; (d) Diels-Alder maleimide/furan click-chemistry; (e) Staudinger ligation; and (f) nitrile-oxide/norbonene cycloaddition click chemistry.

104. The antibody-drug conjugate according to claim 102, wherein the click chemistry adduct comprises a triazole or a diazine.

105. The antibody-drug conjugate according to claim 102, wherein the click chemistry adduct is selected from the group consisting of: [chemical structure]
and any regio-isomers or entantiomers thereof, where R′ is H or a C₁₋₃ alkyl and Z is C or N.

106. The antibody-drug conjugate according to claim 102, wherein AA comprises a natural amino acid selected from glycine, alanine, valine, leucine, isoleucine, phenylalanine, tyrosine, threonine, lysine, asparagine, glutamine, aspartic acid, and glutamic acid.

107. The antibody-drug conjugate according to claim 102, wherein AA comprises a nonnatural amino acid selected from the group consisting of an R-amino acid, an N-methyl amino acid,

[chemical structure]

108. The antibody-drug conjugate according to claim 102, wherein said compound of Formula (II) comprises

[chemical structure]

[chemical structure]

[chemical structure]

109. The antibody-drug conjugate according to claim 100 having a structure according to Formula (III) [chemical structure]
or a pharmaceutically acceptable salt thereof, wherein
Ab is an antibody or an antigen-binding fragment thereof,
R¹, R², R³, and R⁴ are independently hydrogen or a C₁₋₅ alkyl;
A is a Click chemistry adduct;
LL is a linker or a bond connecting said Ab and said A;
AA is a natural or a nonnatural amino acid;
m is an integer from 0 to 8;
n is 0 or 1;
p is an integer from 1 to 6;
and q is an integer from 1 to 10.

110. The antibody-drug conjugate according to claim 100 having a structure according to a Formula selected from the group consisting of IVa, IVb, IVc, IVd, IVe, IVf, IVg IVh, IVi, IVj, and IVk: [chemical structure] [chemical structure] [chemical structure] [chemical structure] [chemical structure] [chemical structure] [chemical structure] [chemical structure] [chemical structure] [chemical structure] [chemical structure]
or a pharmaceutically acceptable salt thereof, wherein
Ab is an antibody or an antigen-binding fragment thereof,
R is a side chain of any natural or nonnatural amino acid;
and n is an integer from 1 to 5.

111. A pharmaceutical composition comprising an antibody-drug conjugate according to claim 100, co-formulated together with one or more pharmaceutically acceptable diluents, excipients, and/or additives.

112. A composition comprising a population of the antibody-drug conjugates according to claim 100, having a drug-antibody ratio (DAR) of about 0.5 to about 30.0.

113. A method for treating cancer in a subject in need thereof comprising the step of administering to the subject a therapeutically effective amount of the antibody-drug conjugate according to claim 100.

114. A linker-payload compound having the formula selected from the group consisting of (D′) to (N′): [chemical structure] [chemical structure] [chemical structure]
or a pharmaceutically acceptable salt thereof,
wherein R¹, R², R³, and R⁴ are independently hydrogen or a C₁₋₅ alkyl;
B is selected from the group consisting of [chemical structure]
W is NH, O, CO, CH₂, a phenyl, or a combination of two or more thereof, and
R⁵, R⁶, R⁷ and R⁸ are independently hydrogen, —NH₂, or a side chain of any natural or non-natural amino acid,
the method comprising a step of exposing a payload having an amino group to an activated intermediate having a para-nitro-phenyl carbonate in the presence of a base and a coupling catalyst to afford said linker-payload compound (D′)-(G′), wherein said coupling catalyst is 4-Hydroxy-2-methylquinoline (MeHYQ).

115. The linker-payload compound of claim 114 having the structure of formula (D), [chemical structure]
or a pharmaceutically acceptable salt thereof,
wherein R¹, R², R³, and R⁴ are independently hydrogen or a C₁₋₅ alkyl, and
R⁵ and R⁶ are independently hydrogen, —NH₂, or a side chain of any natural or non-natural amino acid.

116. The linker-payload compound of claim 114 having the structure selected from the group consisting of:

[chemical structure]

[chemical structure]

[chemical structure]

[chemical structure]

[chemical structure]

117. A process for manufacturing a linker-payload compound having the formula selected from the group consisting of (D′) to (N′): [chemical structure] [chemical structure] [chemical structure]
or a pharmaceutically acceptable salt thereof,
wherein R¹, R², R³, and R⁴ are independently hydrogen or a C₁₋₅ alkyl;
B is selected from the group consisting of [chemical structure]
W is NH, O, CO, CH₂, a phenyl, or a combination of two or more thereof, and
R⁵, R⁶, R⁷ and R⁸ are independently hydrogen, —NH₂, or a side chain of any natural or non-natural amino acid,
the method comprising a step of exposing a payload having an amino group to an activated intermediate having a para-nitro-phenyl carbonate in the presence of a base and a coupling catalyst to afford said linker-payload compound (D′)-(N′), wherein said coupling catalyst is 4-Hydroxy-2-methylquinoline (MeHYQ).

118. The process of claim 117, wherein the linker-payload compound has the structure of formula (D-1) [chemical structure]
or a pharmaceutically acceptable salt thereof,
wherein R¹, R², R³, and R⁴ are independently hydrogen or a C₁₋₅ alkyl, and
R⁵ and R⁶ are independently hydrogen, —NH₂, or a side chain of any natural or non-natural amino acid,
the process comprising a step of exposing a drug payload having an amino group to an activated intermediate having a para-nitro-phenyl carbonate in the presence of a base and a coupling catalyst to afford said linker-payload compound (D-1), wherein said coupling catalyst is 4-Hydroxy-2-methylquinoline (MeHYQ).

119. The process of claim 117, wherein the linker-payload compound has the structure of Formula (D-1): [chemical structure]
or a pharmaceutically acceptable salt thereof,
wherein R¹, R², R³, and R⁴ are independently hydrogen or a C₁₋₅ alkyl, and
R⁵ and R⁶ are independently hydrogen, —NH₂, or a side chain of any natural or non-natural amino acid,
said process comprising:
(a) providing a compound of Formula (I-1) having the structure: [chemical structure]
wherein
X is selected from the group consisting of [chemical structure]
and
(b) reacting the compound of Formula (I-1) with a compound of Formula (P-I): [chemical structure]
wherein
R is H or PG; and
PG is a suitable protecting group;
to produce the compound of Formula (D-1).

120. The process of claim 119, wherein the compound of Formula (D-1) has the following structure:

[chemical structure]

121. The process of claim 119, wherein the compound of Formula (I-1) has the following structure:

[chemical structure]

122. The process of claim 119, wherein the compound of Formula (P-I) has the following structure:

[chemical structure]

123. The process according to claim 119 further comprising the steps of:
providing a compound of Formula (V) having the structure: [chemical structure]
and
forming the compound of Formula (I-1) from the compound of Formula (V) prior to the step (a).

124. The process according to claim 119 wherein the compound of Formula (I-1) is prepared according to the steps of:
(a) providing a compound of Formula (V) having the structure: [chemical structure]
and
(b) forming the compound of Formula (I-1) from the compound of Formula (V).

125. The process according to claim 124, wherein said step (b) of forming the compound of Formula (I-1) comprises:
reacting the compound of Formula (V) with a compound of Formula (VIa) or Formula (VIb): [chemical structure]
wherein
X′ is halogen,
to produce the compound of Formula (I-1).

126. The process according to claim 124 further comprising the steps of:
providing a compound of Formula (VII) having the structure: [chemical structure]
wherein PG¹ is a suitable protecting group protecting group, and
forming the compound of Formula (V) from the compound of Formula (VII).

127. The process of claim 126, wherein the compound of Formula (VII) has the following structure:

[chemical structure]

128. The process according to claim 126, wherein said step of forming the compound of Formula (V) comprises:
reacting the compound of Formula (VII) with a compound of Formula (VIII): [chemical structure]
to produce the compound of Formula (V).

129. The process according to claim 126 further comprising the steps of:
providing a compound of Formula (IX) having the structure: [chemical structure]
and
forming the compound of Formula (VII) from the compound of Formula (IX).

130. The process of claim 129, wherein the compound of Formula (IX) has the following structure:

[chemical structure]

131. The process according to claim 129, wherein said step of forming the compound of Formula (VII) comprises:
reacting the compound of Formula (IX) with a compound of Formula (X): [chemical structure]
to produce the compound of Formula (VII).

132. The process according to claim 129 further comprising the steps of:
providing a compound of Formula (XI) having the structure: [chemical structure]
and
forming the compound of Formula (IX) from the compound of Formula (XI).

133. The process of claim 132, wherein the compound of Formula (XI) has the following structure:

[chemical structure]

134. The process according to claim 132, wherein said step of forming the compound of Formula (IX) comprises:
reacting the compound of Formula (XI) with a compound of Formula (XII): [chemical structure]
to produce the compound of Formula (IX).

135. The process of claim 119, wherein the compound of Formula (D-1) has the following structure:

[chemical structure]

136. The method of claim 135, wherein said step (b) of reacting the compound of Formula (I-1) with the compound of Formula (P-I) further comprises:
reacting the compound of Formula (P-I), wherein R is PG, with a protecting group removing agent prior to said reacting with the compound of Formula (I-1).

137. The process according to claim 135, wherein the PG is selected from the group consisting of allyloxycarbonyl (Alloc), benzyloxycarbonyl (Cbz), tert-butyloxycarbonyl (Boc), and 9-fluorenylmethoxycarbonyl (Fmoc).

138. The process according to claim 135, wherein the protecting group removing agent is selected from the group consisting of Pd(PPh)₃, PhSiH₃, H₂, piperidine, and trifluoroacetic acid (TFA).

139. The process of claim 135, wherein the compound of Formula (P-I) has the following structure:

[chemical structure]

140. The process according to claim 135, further comprising the steps of:
providing a compound of Formula (XVIII) having the structure: [chemical structure]
and
forming the compound of Formula (P-I) from the compound of Formula (XVIII).

141. The process of claim 140, wherein the compound of Formula (XVIII) has the following structure:

[chemical structure]

142. The process according to claim 140, wherein the step of forming the compound of Formula (P-I) comprises:
reacting the compound of Formula (XVIII) with a compound of Formula (XIX): [chemical structure]
to produce the compound of Formula (P-I).

143. A process for preparation of a compound of Formula (D-1): [chemical structure]
or a pharmaceutically acceptable salt thereof,
wherein R¹, R², R³, and R⁴ are independently hydrogen or a C₁₋₅ alkyl, and
R⁵ and R⁶ are independently hydrogen, —NH₂, or a side chain of any natural or non-natural amino acid,
said process comprising:
(a) providing a compound of Formula (XXIII): [chemical structure]
and
(b) reacting the compound of Formula (XXIII) with a compound having the structure: [chemical structure]
in the presence of an activating reagent and a base to produce the compound of Formula (D-1).

144. The process of claim 143, wherein the compound of Formula (D-1) has the following structure: [chemical structure]

The application's sequence listing, which the Patent Office published only in electronic form, follows.

SEQUENCE LISTING (2142 sequences)

SEQ ID NO: 1 - DNA, 399 bp, synthetic construct
  misc_feature 1..399: note = Description of Artificial Sequence: Synthetic polynucleotide
  source 1..399: mol_type = other DNA
caggtacagctgcagcagtcaggtccaggactggtgaagccctcgcagaccctctcactcacctgtgccatctccggggacagtgtctctagcaacagtgctgcttggaactggatcaggcagtccccatcgagaggccttgagtggctgggaaggacatactataggtccaagtggtataatgattatgcagtatctgtgaaaagtcgaataaccatcaacccagacacatccaagaaccagttctccctgcacctgaactctgtgactcccgaggacacggctgtgtattactgtgcaagggcgggaattgtagtagtaccaggtccggatatttattactactactactacggtatggacgtctggggccaagggaccacggtcaccgtctcctca

SEQ ID NO: 2 - protein, 133 aa, synthetic construct
  REGION 1..133: note = Description of Artificial Sequence: Synthetic polypeptide
QVQLQQSGPGLVKPSQTLSLTCAISGDSVSSNSAAWNWIRQSPSRGLEWLGRTYYRSKWYNDYAVSVKSRITINPDTSKNQFSLHLNSVTPEDTAVYYCARAGIVVVPGPDIYYYYYYGMDVWGQGTTVTVSS

SEQ ID NO: 3 - DNA, 30 bp, synthetic construct
  misc_feature 1..30: note = Description of Artificial Sequence: Synthetic oligonucleotide
  source 1..30: mol_type = other DNA
ggggacagtgtctctagcaacagtgctgct

SEQ ID NO: 4 - protein, 10 aa, synthetic construct
  REGION 1..10: note = Description of Artificial Sequence: Synthetic peptide
GDSVSSNSAA

SEQ ID NO: 5 - DNA, 27 bp, synthetic construct
  misc_feature 1..27: note = Description of Artificial Sequence: Synthetic oligonucleotide
  source 1..27: mol_type = other DNA
acatactataggtccaagtggtataat

SEQ ID NO: 6 - protein, 9 aa, synthetic construct
  REGION 1..9: note = Description of Artificial Sequence: Synthetic peptide
TYYRSKWYN

SEQ ID NO: 7 - DNA, 69 bp, synthetic construct
  misc_feature 1..69: note = Description of Artificial Sequence: Synthetic oligonucleotide
  source 1..69: mol_type = other DNA
gcaagggcgggaattgtagtagtaccaggtccggatatttattactactactactacggtatggacgtc

SEQ ID NO: 8 - protein, 23 aa, synthetic construct
  REGION 1..23: note = Description of Artificial Sequence: Synthetic peptide
ARAGIVVVPGPDIYYYYYYGMDV

SEQ ID NO: 9 - DNA, 324 bp, synthetic construct
  misc_feature 1..324: note = Description of Artificial Sequence: Synthetic polynucleotide
  source 1..324: mol_type = other DNA
gacatccagatgacccagtctccatcctccctgtctgcatctgtaggagacagagtcaccatcacttgccgggcaagtcagagcattagaagctatttaaattggtatcagcagaaaccagggaaagcccctaagctcctgatctatgctgcatccagtttgcaaagtggggtcccatcaaggttcagtggcagtggatctgggacagatttcactctcaccatcagcagtctgcaacctgaagattttgcaacttactactgtcaacagagttacagtacccctccgatcaccttcggccaagggacacgactggagattaaa

SEQ ID NO: 10 - protein, 108 aa, synthetic construct
  REGION 1..108: note = Description of Artificial Sequence: Synthetic polypeptide
DIQMTQSPSSLSASVGDRVTITCRASQSIRSYLNWYQQKPGKAPKLLIYAASSLQSGVPSRFSGSGSGTDFTLTISSLQPEDFATYYCQQSYSTPPITFGQGTRLEIK

SEQ ID NO: 11 - DNA, 18 bp, synthetic construct
  misc_feature 1..18: note = Description of Artificial Sequence: Synthetic oligonucleotide
  source 1..18: mol_type = other DNA
cagagcattagaagctat

SEQ ID NO: 12 - protein, 6 aa, synthetic construct
  REGION 1..6: note = Description of Artificial Sequence: Synthetic peptide
QSIRSY

SEQ ID NO: 13-14 - skipped (2 entries)

SEQ ID NO: 15 - DNA, 30 bp, synthetic construct
  misc_feature 1..30: note = Description of Artificial Sequence: Synthetic oligonucleotide
  source 1..30: mol_type = other DNA
caacagagttacagtacccctccgatcacc

SEQ ID NO: 16 - protein, 10 aa, synthetic construct
  REGION 1..10: note = Description of Artificial Sequence: Synthetic peptide
QQSYSTPPIT

SEQ ID NO: 17 - DNA, 381 bp, synthetic construct
  misc_feature 1..381: note = Description of Artificial Sequence: Synthetic polynucleotide
  source 1..381: mol_type = other DNA
caggtgcagctggtgcagtctggggctgaggtgaagaagcctggggcctcagtgaaggtctcctgcaaggcttctggatacaccttcaccggctacgatatgcactgggtgcgacaggcccctgggcaagggcttgagtggatgggatggatcaaccctaacagtggtggcacaaactatgcacagaagtttcagggcagggtcaccatgaccagggacacgtccatcagcacagcctacatggagctgagcaggctgagatctgacgacacggccgtgtattactgtgcgagaattgggatggtagtatcaggtgctaattactactactactacggtatggacgtctggggccaagggaccacggtcaccgtctcctca

SEQ ID NO: 18 - protein, 127 aa, synthetic construct
  REGION 1..127: note = Description of Artificial Sequence: Synthetic polypeptide
QVQLVQSGAEVKKPGASVKVSCKASGYTFTGYDMHWVRQAPGQGLEWMGWINPNSGGTNYAQKFQGRVTMTRDTSISTAYMELSRLRSDDTAVYYCARIGMVVSGANYYYYYGMDVWGQGTTVTVSS

SEQ ID NO: 19 - DNA, 24 bp, synthetic construct
  misc_feature 1..24: note = Description of Artificial Sequence: Synthetic oligonucleotide
  source 1..24: mol_type = other DNA
ggatacaccttcaccggctacgat

SEQ ID NO: 20 - protein, 8 aa, synthetic construct
  REGION 1..8: note = Description of Artificial Sequence: Synthetic peptide
GYTFTGYD

SEQ ID NO: 21 - DNA, 24 bp, synthetic construct
  misc_feature 1..24: note = Description of Artificial Sequence: Synthetic oligonucleotide
  source 1..24: mol_type = other DNA
atcaaccctaacagtggtggcaca

SEQ ID NO: 22 - protein, 8 aa, synthetic construct
  REGION 1..8: note = Description of Artificial Sequence: Synthetic peptide
INPNSGGT

SEQ ID NO: 23 - DNA, 60 bp, synthetic construct
  misc_feature 1..60: note = Description of Artificial Sequence: Synthetic oligonucleotide
  source 1..60: mol_type = other DNA
gcgagaattgggatggtagtatcaggtgctaattactactactactacggtatggacgtc

SEQ ID NO: 24 - protein, 20 aa, synthetic construct
  REGION 1..20: note = Description of Artificial Sequence: Synthetic peptide
ARIGMVVSGANYYYYYGMDV

SEQ ID NO: 25 - DNA, 321 bp, synthetic construct
  misc_feature 1..321: note = Description of Artificial Sequence: Synthetic polynucleotide
  source 1..321: mol_type = other DNA
gccatccagatgacccagtctccatcctccctgtctgcatatgtaggagacagagtcatcatcacttgccgggcaagtcagggcattagaaatgatttaggctggtatcagcagaaaccagggaaagcccctaagctcctgatctatgctgcatccagtttacaaagtggggtcccatcaaggttcagcggcagtagatctggcacagttttcactctcaccatcagcagcctgcagcctgaagattttgcaacttattactgtctgcaagattacaattacccgtggacgttcggccaagggaccaaggtggaaatcaaa

SEQ ID NO: 26 - protein, 107 aa, synthetic construct
  REGION 1..107: note = Description of Artificial Sequence: Synthetic polypeptide
AIQMTQSPSSLSAYVGDRVIITCRASQGIRNDLGWYQQKPGKAPKLLIYAASSLQSGVPSRFSGSRSGTVFTLTISSLQPEDFATYYCLQDYNYPWTFGQGTKVEIK

SEQ ID NO: 27 - DNA, 18 bp, synthetic construct
  misc_feature 1..18: note = Description of Artificial Sequence: Synthetic oligonucleotide
  source 1..18: mol_type = other DNA
cagggcattagaaatgat

SEQ ID NO: 28 - protein, 6 aa, synthetic construct
  REGION 1..6: note = Description of Artificial Sequence: Synthetic peptide
QGIRND

SEQ ID NO: 29-30 - skipped (2 entries)

SEQ ID NO: 31 - DNA, 27 bp, synthetic construct
  misc_feature 1..27: note = Description of Artificial Sequence: Synthetic oligonucleotide
  source 1..27: mol_type = other DNA
ctgcaagattacaattacccgtggacg

SEQ ID NO: 32 - protein, 9 aa, synthetic construct
  REGION 1..9: note = Description of Artificial Sequence: Synthetic peptide
LQDYNYPWT

SEQ ID NO: 33 - DNA, 360 bp, synthetic construct
  misc_feature 1..360: note = Description of Artificial Sequence: Synthetic polynucleotide
  source 1..360: mol_type = other DNA
gaggtgcagctggtggagtctgggggaggcttggtccagcctggggggtccctgagactctcctgtgcagcctctggattcaccttcagtacctatgctatgcactgggtccgccaggctccagggaagggactgcaacatgtttcaactattagtactaatggggttaacacatattatgcagactctgtgaagggcagattcaccatctccagagacaattccaagagcacgctgtatcttcaaatgggcagcctgagagctgaggacatggctgtatattactgtgcgagagataaagatttttggagtggttattttgactactggggccagggaaccctggtcaccgtctcctca

SEQ ID NO: 34 - protein, 120 aa, synthetic construct
  REGION 1..120: note = Description of Artificial Sequence: Synthetic polypeptide
EVQLVESGGGLVQPGGSLRLSCAASGFTFSTYAMHWVRQAPGKGLQHVSTISTNGVNTYYADSVKGRFTISRDNSKSTLYLQMGSLRAEDMAVYYCARDKDFWSGYFDYWGQGTLVTVSS

SEQ ID NO: 35 - DNA, 24 bp, synthetic construct
  misc_feature 1..24: note = Description of Artificial Sequence: Synthetic oligonucleotide
  source 1..24: mol_type = other DNA
ggattcaccttcagtacctatgct

SEQ ID NO: 36 - protein, 8 aa, synthetic construct
  REGION 1..8: note = Description of Artificial Sequence: Synthetic peptide
GFTFSTYA

SEQ ID NO: 37 - DNA, 24 bp, synthetic construct
  misc_feature 1..24: note = Description of Artificial Sequence: Synthetic oligonucleotide
  source 1..24: mol_type = other DNA
attagtactaatggggttaacaca

SEQ ID NO: 38 - protein, 8 aa, synthetic construct
  REGION 1..8: note = Description of Artificial Sequence: Synthetic peptide
ISTNGVNT

SEQ ID NO: 39 - DNA, 39 bp, synthetic construct
  misc_feature 1..39: note = Description of Artificial Sequence: Synthetic oligonucleotide
  source 1..39: mol_type = other DNA
gcgagagataaagatttttggagtggttattttgactac

SEQ ID NO: 40 - protein, 13 aa, synthetic construct
  REGION 1..13: note = Description of Artificial Sequence: Synthetic peptide
ARDKDFWSGYFDY

SEQ ID NO: 41 - DNA, 321 bp, synthetic construct
  misc_feature 1..321: note = Description of Artificial Sequence: Synthetic polynucleotide
  source 1..321: mol_type = other DNA
gaaattgtgatgacgcagtctccaggcaccctgtctgtgtctccaggggaaagagccaccctctcctgtagggccagtcagagtgttagtagcaacttagcctggtaccaccagaaacctggccaggctcccaggctcctcatctatggtgcatccaccagggccactggtttcccagccaggttcagtggcagtgggtctgggacagagttcactctcaccatcagcagcctgcagtcggaagattttgcagcttattactgtcagcagtataataattggcccatcaccttcggccaagggacacgactggagattaaa

SEQ ID NO: 42 - protein, 107 aa, synthetic construct
  REGION 1..107: note = Description of Artificial Sequence: Synthetic polypeptide
EIVMTQSPGTLSVSPGERATLSCRASQSVSSNLAWYHQKPGQAPRLLIYGASTRATGFPARFSGSGSGTEFTLTISSLQSEDFAAYYCQQYNNWPITFGQGTRLEIK

SEQ ID NO: 43 - DNA, 18 bp, synthetic construct
  misc_feature 1..18: note = Description of Artificial Sequence: Synthetic oligonucleotide
  source 1..18: mol_type = other DNA
cagagtgttagtagcaac

SEQ ID NO: 44 - protein, 6 aa, synthetic construct
  REGION 1..6: note = Description of Artificial Sequence: Synthetic peptide
QSVSSN

SEQ ID NO: 45-46 - skipped (2 entries)

SEQ ID NO: 47 - DNA, 27 bp, synthetic construct
  misc_feature 1..27: note = Description of Artificial Sequence: Synthetic oligonucleotide
  source 1..27: mol_type = other DNA
cagcagtataataattggcccatcacc

SEQ ID NO: 48 - protein, 9 aa, synthetic construct
  REGION 1..9: note = Description of Artificial Sequence: Synthetic peptide
QQYNNWPIT

SEQ ID NO: 49 - DNA, 363 bp, synthetic construct
  misc_feature 1..363: note = Description of Artificial Sequence: Synthetic polynucleotide
  source 1..363: mol_type = other DNA
caggtgcagctgcaggagtcgggcccaggactggtgaagccttcacagaccctgtccctcacctgcactgtctctggttactccatcaacagtggtggtcatttctggagctggatccgccagcacccagggaagggcctggagtggattggggacatctattacagtgggaacacctactccattccgtccctcaagcgtcgaatttccatgtcagtagacacgtctaagaaccacttctccctgaaactgatctctgtgacggccgcggacacggccatttattactgtgcgagaaatagtgggggctatcttgatgcttttgatatctggggccaagggacaatggtcaccgtctcttca

SEQ ID NO: 50 - protein, 121 aa, synthetic construct
  REGION 1..121: note = Description of Artificial Sequence: Synthetic polypeptide
QVQLQESGPGLVKPSQTLSLTCTVSGYSINSGGHFWSWIRQHPGKGLEWIGDIYYSGNTYSIPSLKRRISMSVDTSKNHFSLKLISVTAADTAIYYCARNSGGYLDAFDIWGQGTMVTVSS

SEQ ID NO: 51 - DNA, 30 bp, synthetic construct
  misc_feature 1..30: note = Description of Artificial Sequence: Synthetic oligonucleotide
  source 1..30: mol_type = other DNA
ggttactccatcaacagtggtggtcatttc

SEQ ID NO: 52 - protein, 10 aa, synthetic construct
  REGION 1..10: note = Description of Artificial Sequence: Synthetic peptide
GYSINSGGHF

SEQ ID NO: 53 - DNA, 21 bp, synthetic construct
  misc_feature 1..21: note = Description of Artificial Sequence: Synthetic oligonucleotide
  source 1..21: mol_type = other DNA
atctattacagtgggaacacc

SEQ ID NO: 54 - protein, 7 aa, synthetic construct
  REGION 1..7: note = Description of Artificial Sequence: Synthetic peptide
IYYSGNT

SEQ ID NO: 55 - DNA, 39 bp, synthetic construct
  misc_feature 1..39: note = Description of Artificial Sequence: Synthetic oligonucleotide
  source 1..39: mol_type = other DNA
gcgagaaatagtgggggctatcttgatgcttttgatatc

SEQ ID NO: 56 - protein, 13 aa, synthetic construct
  REGION 1..13: note = Description of Artificial Sequence: Synthetic peptide
ARNSGGYLDAFDI

SEQ ID NO: 57 - DNA, 324 bp, synthetic construct
  misc_feature 1..324: note = Description of Artificial Sequence: Synthetic polynucleotide
  source 1..324: mol_type = other DNA
gacatccagatgacccagtctccatcctccctgtctgcatctgtaggagacagagtcaccatcacttgccgggcaagtcagagcattagcagctatttaaattggtatcagcagaaaccagggaaagcccctaagctcctgatctatgctgcatccagtttgcaaagtggggtcccgtcaaggttcagtggcagtggatctgggacagatttcactctcaccatcagcagtctgcaacctgaagattttgcaacttactactgtcaacagagttacagtacccctccgatcaccttcggccaagggacacgactggagattaaa

SEQ ID NO: 58 - protein, 108 aa, synthetic construct
  REGION 1..108: note = Description of Artificial Sequence: Synthetic polypeptide
DIQMTQSPSSLSASVGDRVTITCRASQSISSYLNWYQQKPGKAPKLLIYAASSLQSGVPSRFSGSGSGTDFTLTISSLQPEDFATYYCQQSYSTPPITFGQGTRLEIK

SEQ ID NO: 59 - DNA, 18 bp, synthetic construct
  misc_feature 1..18: note = Description of Artificial Sequence: Synthetic oligonucleotide
  source 1..18: mol_type = other DNA
cagagcattagcagctat

SEQ ID NO: 60 - protein, 6 aa, synthetic construct
  REGION 1..6: note = Description of Artificial Sequence: Synthetic peptide
QSISSY

SEQ ID NO: 61-62 - skipped (2 entries)

SEQ ID NO: 63 - DNA, 30 bp, synthetic construct; identical to SEQ ID NO: 15
  misc_feature 1..30: note = Description of Artificial Sequence: Synthetic oligonucleotide
  source 1..30: mol_type = other DNA

SEQ ID NO: 64 - protein, 10 aa, synthetic construct
  REGION 1..10: note = Description of Artificial Sequence: Synthetic peptide
QQSYSTPPIT

SEQ ID NO: 65 - DNA, 387 bp, synthetic construct
  misc_feature 1..387: note = Description of Artificial Sequence: Synthetic polynucleotide
  source 1..387: mol_type = other DNA
gaggtgcagctggtggagtctgggggaggcttggtacagccgggggggtccctgagactctcctgtgcaacctctggattcaccttcagtaactacgacttccactgggtccgccaaattagaggacaaggtctggagtgggtctctactattgacactgctggtgacacatacttttcaggctccgtgaagggccgcttcaccatctccagagacactgccaaaacctccttgtatcttcaaatgaacagcctgagagccggggacacggctgtgtattactgtgcaagagcccctcgttatgatagtactggtaactactacaattactattcctatttcggcctggacgtctggggccaagggaccacggtcaccgtctcctca

SEQ ID NO: 66 - protein, 129 aa, synthetic construct
  REGION 1..129: note = Description of Artificial Sequence: Synthetic polypeptide
EVQLVESGGGLVQPGGSLRLSCATSGFTFSNYDFHWVRQIRGQGLEWVSTIDTAGDTYFSGSVKGRFTISRDTAKTSLYLQMNSLRAGDTAVYYCARAPRYDSTGNYYNYYSYFGLDVWGQGTTVTVSS

SEQ ID NO: 67 - DNA, 24 bp, synthetic construct
  misc_feature 1..24: note = Description of Artificial Sequence: Synthetic oligonucleotide
  source 1..24: mol_type = other DNA
ggattcaccttcagtaactacgac

SEQ ID NO: 68 - protein, 8 aa, synthetic construct
  REGION 1..8: note = Description of Artificial Sequence: Synthetic peptide
GFTFSNYD

SEQ ID NO: 69 - DNA, 21 bp, synthetic construct
  misc_feature 1..21: note = Description of Artificial Sequence: Synthetic oligonucleotide
  source 1..21: mol_type = other DNA
attgacactgctggtgacaca

SEQ ID NO: 70 - protein, 7 aa, synthetic construct
  REGION 1..7: note = Description of Artificial Sequence: Synthetic peptide
IDTAGDT

SEQ ID NO: 71 - DNA, 69 bp, synthetic construct
  misc_feature 1..69: note = Description of Artificial Sequence: Synthetic oligonucleotide
  source 1..69: mol_type = other DNA
gcaagagcccctcgttatgatagtactggtaactactacaattactattcctatttcggcctggacgtc

SEQ ID NO: 72 - protein, 23 aa, synthetic construct
  REGION 1..23: note = Description of Artificial Sequence: Synthetic peptide
ARAPRYDSTGNYYNYYSYFGLDV

SEQ ID NO: 73 - DNA, 375 bp, synthetic construct
  misc_feature 1..375: note = Description of Artificial Sequence: Synthetic polynucleotide
  source 1..375: mol_type = other DNA
caggtccagctggtacagtctggggctgaggtgaagaagcctggggcctcagtgaaggtctcctgcaaggtttccggatacaccctcactgaattatccatgcactgggtgcgacaggctcctggaaaagggcttgagtggatgggaagttttgatcctgaagatgatgaaacaatctacgcacagaagttccagggcagagtcaccatgaccgaggacacatctacagacacagcctacatggacctgagcagcctaagatctgaggacacggccgtgtattactgttcaatagaggaagttcgttggcggggatcggactactactacgttatggacgtctggggccaagggaccacggtcaccgtctcctca

SEQ ID NO: 74 - protein, 125 aa, synthetic construct
  REGION 1..125: note = Description of Artificial Sequence: Synthetic polypeptide
QVQLVQSGAEVKKPGASVKVSCKVSGYTLTELSMHWVRQAPGKGLEWMGSFDPEDDETIYAQKFQGRVTMTEDTSTDTAYMDLSSLRSEDTAVYYCSIEEVRWRGSDYYYVMDVWGQGTTVTVSS

SEQ ID NO: 75 - DNA, 24 bp, synthetic construct
  misc_feature 1..24: note = Description of Artificial Sequence: Synthetic oligonucleotide
  source 1..24: mol_type = other DNA
ggatacaccctcactgaattatcc

SEQ ID NO: 76 - protein, 8 aa, synthetic construct
  REGION 1..8: note = Description of Artificial Sequence: Synthetic peptide
GYTLTELS

SEQ ID NO: 77 - DNA, 24 bp, synthetic construct
  misc_feature 1..24: note = Description of Artificial Sequence: Synthetic oligonucleotide
  source 1..24: mol_type = other DNA
tttgatcctgaagatgatgaaaca

SEQ ID NO: 78 - protein, 8 aa, synthetic construct
  REGION 1..8: note = Description of Artificial Sequence: Synthetic peptide
FDPEDDET

SEQ ID NO: 79 - DNA, 54 bp, synthetic construct
  misc_feature 1..54: note = Description of Artificial Sequence: Synthetic oligonucleotide
  source 1..54: mol_type = other DNA
tcaatagaggaagttcgttggcggggatcggactactactacgttatggacgtc

SEQ ID NO: 80 - protein, 18 aa, synthetic construct
  REGION 1..18: note = Description of Artificial Sequence: Synthetic peptide
SIEEVRWRGSDYYYVMDV

SEQ ID NO: 81 - DNA, 372 bp, synthetic construct
  misc_feature 1..372: note = Description of Artificial Sequence: Synthetic polynucleotide
  source 1..372: mol_type = other DNA
caggtgcagctggtgcagtctggggctgaggtgaagaagcctgggtcctcggtgaaggtctcctgcagggcttctggaggcaccttcagcagatttgctatcggctgggtgcgacaggcccctggacaagggcttgagtggatgggagggatcatccctatctttggtacagcaagctacgcacagaagttccagggcagagtcacgattaccacggacgaatccacgagcacagcctacatggagttgcgaagcctgagatctgaggacacggccgtatattactgtacgagagaaggtataactggtcgaggctactactactacggtatggacgtctggggccaagggaccacggtcaccgtctcctca

SEQ ID NO: 82 - protein, 124 aa, synthetic construct
  REGION 1..124: note = Description of Artificial Sequence: Synthetic polypeptide
QVQLVQSGAEVKKPGSSVKVSCRASGGTFSRFAIGWVRQAPGQGLEWMGGIIPIFGTASYAQKFQGRVTITTDESTSTAYMELRSLRSEDTAVYYCTREGITGRGYYYYGMDVWGQGTTVTVSS

SEQ ID NO: 83 - DNA, 24 bp, synthetic construct
  misc_feature 1..24: note = Description of Artificial Sequence: Synthetic oligonucleotide
  source 1..24: mol_type = other DNA
ggaggcaccttcagcagatttgct

SEQ ID NO: 84 - protein, 8 aa, synthetic construct
  REGION 1..8: note = Description of Artificial Sequence: Synthetic peptide
GGTFSRFA

SEQ ID NO: 85 - DNA, 24 bp, synthetic construct
  misc_feature 1..24: note = Description of Artificial Sequence: Synthetic oligonucleotide
  source 1..24: mol_type = other DNA
atcatccctatctttggtacagca

SEQ ID NO: 86 - protein, 8 aa, synthetic construct
  REGION 1..8: note = Description of Artificial Sequence: Synthetic peptide
IIPIFGTA

SEQ ID NO: 87 - DNA, 51 bp, synthetic construct
  misc_feature 1..51: note = Description of Artificial Sequence: Synthetic oligonucleotide
  source 1..51: mol_type = other DNA
acgagagaaggtataactggtcgaggctactactactacggtatggacgtc

SEQ ID NO: 88 - protein, 17 aa, synthetic construct
  REGION 1..17: note = Description of Artificial Sequence: Synthetic peptide
TREGITGRGYYYYGMDV

SEQ ID NO: 89 - DNA, 357 bp, synthetic construct
  misc_feature 1..357: note = Description of Artificial Sequence: Synthetic polynucleotide
  source 1..357: mol_type = other DNA
caggtgcagctgcaggagtcgggcccaggactggtgaagccttcggagaccctgtccctcacctgcactgtctctggtggctccatcagtatttactactggacctggatccggcagcccccagggaagggactggagtggattgggaatatcttttacagtgggagcaccaactacaacccctccctcaagagtcgagtcaccatatcagtagacacgtccaagaatcagttttccctgaagttgagctctgtgaccgctgcggacacggccgtgtattactgtgcgagagagagactggggcgttacgatgcttttgataattggggccaagggacaatggtcaccgtctcttca

SEQ ID NO: 90 - protein, 119 aa, synthetic construct
  REGION 1..119: note = Description of Artificial Sequence: Synthetic polypeptide
QVQLQESGPGLVKPSETLSLTCTVSGGSISIYYWTWIRQPPGKGLEWIGNIFYSGSTNYNPSLKSRVTISVDTSKNQFSLKLSSVTAADTAVYYCARERLGRYDAFDNWGQGTMVTVSS

SEQ ID NO: 91 - DNA, 24 bp, synthetic construct
  misc_feature 1..24: note = Description of Artificial Sequence: Synthetic oligonucleotide
  source 1..24: mol_type = other DNA
ggtggctccatcagtatttactac

SEQ ID NO: 92 - protein, 8 aa, synthetic construct
  REGION 1..8: note = Description of Artificial Sequence: Synthetic peptide
GGSISIYY

SEQ ID NO: 93 - DNA, 21 bp, synthetic construct
  misc_feature 1..21: note = Description of Artificial Sequence: Synthetic oligonucleotide
  source 1..21: mol_type = other DNA
atcttttacagtgggagcacc

SEQ ID NO: 94 - protein, 7 aa, synthetic construct
  REGION 1..7: note = Description of Artificial Sequence: Synthetic peptide
IFYSGST

SEQ ID NO: 95 - DNA, 39 bp, synthetic construct
  misc_feature 1..39: note = Description of Artificial Sequence: Synthetic oligonucleotide
  source 1..39: mol_type = other DNA
gcgagagagagactggggcgttacgatgcttttgataat

SEQ ID NO: 96 - protein, 13 aa, synthetic construct
  REGION 1..13: note = Description of Artificial Sequence: Synthetic peptide
ARERLGRYDAFDN

SEQ ID NO: 97 - DNA, 366 bp, synthetic construct
  misc_feature 1..366: note = Description of Artificial Sequence: Synthetic polynucleotide
  source 1..366: mol_type = other DNA
gaggtgcagctggtggagtctgggggaggcttggtacagcctggggggtccctgagactctcctgtgcagcctctagattcacctttagtagctatgccatgagttgggtccgccaggctccagggaaggggctggagtgggtctcacttattagtggtagtggtggtaggacatggtacgcagactccgtgaagggccggttcaccatctccagagacaattccaagaacacgctgtttctgcaaatgaacagcctgagagccgaggacacggccgtctattactgtgcgaaagaaggggggatttttggagtggttaccttctttgactactggggccagggaaccctggtcaccgtctcctca

SEQ ID NO: 98 - protein, 122 aa, synthetic construct
  REGION 1..122: note = Description of Artificial Sequence: Synthetic polypeptide
EVQLVESGGGLVQPGGSLRLSCAASRFTFSSYAMSWVRQAPGKGLEWVSLISGSGGRTWYADSVKGRFTISRDNSKNTLFLQMNSLRAEDTAVYYCAKEGGIFGVVTFFDYWGQGTLVTVSS

SEQ ID NO: 99 - DNA, 24 bp, synthetic construct
  misc_feature 1..24: note = Description of Artificial Sequence: Synthetic oligonucleotide
  source 1..24: mol_type = other DNA
agattcacctttagtagctatgcc

SEQ ID NO: 100 - protein, 8 aa, synthetic construct
  REGION 1..8: note = Description of Artificial Sequence: Synthetic peptide
RFTFSSYA

SEQ ID NO: 101 - DNA, 24 bp, synthetic construct
  misc_feature 1..24: note = Description of Artificial Sequence: Synthetic oligonucleotide
  source 1..24: mol_type = other DNA
attagtggtagtggtggtaggaca

SEQ ID NO: 102 - protein, 8 aa, synthetic construct
  REGION 1..8: note = Description of Artificial Sequence: Synthetic peptide
ISGSGGRT

SEQ ID NO: 103 - DNA, 45 bp, synthetic construct
  misc_feature 1..45: note = Description of Artificial Sequence: Synthetic oligonucleotide
  source 1..45: mol_type = other DNA
gcgaaagaaggggggatttttggagtggttaccttctttgactac

SEQ ID NO: 104 - protein, 15 aa, synthetic construct
  REGION 1..15: note = Description of Artificial Sequence: Synthetic peptide
AKEGGIFGVVTFFDY

SEQ ID NO: 105 - DNA, 360 bp, synthetic construct
  misc_feature 1..360: note = Description of Artificial Sequence: Synthetic polynucleotide
  source 1..360: mol_type = other DNA
gaggtgcagctggtggagtctgggggaggcttggtacagcctggggggtccctgagactctcctgtgcagtctctggattcacctttagcagctatgccatgagctgggtccgccaggctccagggaaggggctggagtgggtctcagttattagtggtagtggtgatttcacataccacgcagactccgtgaagggccggttcaccatctccagagacaattccaagtccacgctgtatctgcaattgaacagcctgagagccgaggacacggccgtatattactgtgcgaaaaagggcttacgatattttgactggtacgactactggggccagggaaccctggtcaccgtctcctca

SEQ ID NO: 106 - protein, 120 aa, synthetic construct
  REGION 1..120: note = Description of Artificial Sequence: Synthetic polypeptide
EVQLVESGGGLVQPGGSLRLSCAVSGFTFSSYAMSWVRQAPGKGLEWVSVISGSGDFTYHADSVKGRFTISRDNSKSTLYLQLNSLRAEDTAVYYCAKKGLRYFDWYDYWGQGTLVTVSS

SEQ ID NO: 107 - DNA, 24 bp, synthetic construct
  misc_feature 1..24: note = Description of Artificial Sequence: Synthetic oligonucleotide
  source 1..24: mol_type = other DNA
ggattcacctttagcagctatgcc

SEQ ID NO: 108 - protein, 8 aa, synthetic construct
  REGION 1..8: note = Description of Artificial Sequence: Synthetic peptide
GFTFSSYA

SEQ ID NO: 109 - DNA, 24 bp, synthetic construct
  misc_feature 1..24: note = Description of Artificial Sequence: Synthetic oligonucleotide
  source 1..24: mol_type = other DNA
attagtggtagtggtgatttcaca

SEQ ID NO: 110 - protein, 8 aa, synthetic construct
  REGION 1..8: note = Description of Artificial Sequence: Synthetic peptide
ISGSGDFT

SEQ ID NO: 111 - DNA, 39 bp, synthetic construct
  misc_feature 1..39: note = Description of Artificial Sequence: Synthetic oligonucleotide
  source 1..39: mol_type = other DNA
gcgaaaaagggcttacgatattttgactggtacgactac

SEQ ID NO: 112 - protein, 13 aa, synthetic construct
  REGION 1..13: note = Description of Artificial Sequence: Synthetic peptide
AKKGLRYFDWYDY

SEQ ID NO: 113 - DNA, 324 bp, synthetic construct
  misc_feature 1..324: note = Description of Artificial Sequence: Synthetic polynucleotide
  source 1..324: mol_type = other DNA
gaaatagttttgacacagagtcccggcacactgtcactctctcccggggaaagagccaccttgtcatgtagagcaagtcagtcagtctctagctcttatctcgcctggtaccagcagaagccgggacaggcccctagactgctgatctacggggcaagttccagggccaccggaatccccgaccggttcagtggaagcggaagcggaaccgattttactttgacgatttctagactggagccagaggatttcgccgtttactattgtcaacagtacggaagcagcccgtggacgtttggccagggcacgaaggtagaaatcaag

SEQ ID NO: 114 - protein, 108 aa, synthetic construct
  REGION 1..108: note = Description of Artificial Sequence: Synthetic polypeptide
EIVLTQSPGTLSLSPGERATLSCRASQSVSSSYLAWYQQKPGQAPRLLIYGASSRATGIPDRFSGSGSGTDFTLTISRLEPEDFAVYYCQQYGSSPWTFGQGTKVEIK

SEQ ID NO: 115 - DNA, 36 bp, synthetic construct
  misc_feature 1..36: note = Description of Artificial Sequence: Synthetic oligonucleotide
  source 1..36: mol_type = other DNA
agagcaagtcagtcagtctctagctcttatctcgcc

SEQ ID NO: 116 - protein, 12 aa, synthetic construct
  REGION 1..12: note = Description of Artificial Sequence: Synthetic peptide
RASQSVSSSYLA

SEQ ID NO: 117 - DNA, 21 bp, synthetic construct
  misc_feature 1..21: note = Description of Artificial Sequence: Synthetic oligonucleotide
  source 1..21: mol_type = other DNA
ggggcaagttccagggccacc

SEQ ID NO: 118 - protein, 7 aa, synthetic construct
  REGION 1..7: note = Description of Artificial Sequence: Synthetic peptide
GASSRAT

SEQ ID NO: 119 - DNA, 27 bp, synthetic construct
  misc_feature 1..27: note = Description of Artificial Sequence: Synthetic oligonucleotide
  source 1..27: mol_type = other DNA
caacagtacggaagcagcccgtggacg

SEQ ID NO: 120 - protein, 9 aa, synthetic construct
  REGION 1..9: note = Description of Artificial Sequence: Synthetic peptide
QQYGSSPWT

SEQ ID NO: 121 - DNA, 375 bp, synthetic construct
  misc_feature 1..375: note = Description of Artificial Sequence: Synthetic polynucleotide
  source 1..375: mol_type = other DNA
caggtgcagctgcaggagtcgggcccaggactggtgaagccttcggagaccctgtccctcacctgcactgtctctggtggctccatcagtagttactactggacctggatccggcagaccccagggaagggactggagtggattgggtatatttattacagtgggagcaccaactacaacccctccctcaagagtcgagtcaccatatcagtagacacgtccaagaaccagttctccctgaagctgaggtctgtggccgctgcggacacggccgtttattactgtgcgagagggacttactaccgtgatagtagtggaaaatatttcaactggttcgacccctggggccagggaaccctggtcaccgtctcctca

SEQ ID NO: 122 - protein, 125 aa, synthetic construct
  REGION 1..125: note = Description of Artificial Sequence: Synthetic polypeptide
QVQLQESGPGLVKPSETLSLTCTVSGGSISSYYWTWIRQTPGKGLEWIGYIYYSGSTNYNPSLKSRVTISVDTSKNQFSLKLRSVAAADTAVYYCARGTYYRDSSGKYFNWFDPWGQGTLVTVSS

SEQ ID NO: 123 - DNA, 24 bp, synthetic construct
  misc_feature 1..24: note = Description of Artificial Sequence: Synthetic oligonucleotide
  source 1..24: mol_type = other DNA
ggtggctccatcagtagttactac

SEQ ID NO: 124 - protein, 8 aa, synthetic construct
  REGION 1..8: note = Description of Artificial Sequence: Synthetic peptide
GGSISSYY

SEQ ID NO: 125 - DNA, 21 bp, synthetic construct
  misc_feature 1..21: note = Description of Artificial Sequence: Synthetic oligonucleotide
  source 1..21: mol_type = other DNA
atttattacagtgggagcacc

SEQ ID NO: 126 - protein, 7 aa, synthetic construct
  REGION 1..7: note = Description of Artificial Sequence: Synthetic peptide
IYYSGST

SEQ ID NO: 127 - DNA, 57 bp, synthetic construct
  misc_feature 1..57: note = Description of Artificial Sequence: Synthetic oligonucleotide
  source 1..57: mol_type = other DNA
gcgagagggacttactaccgtgatagtagtggaaaatatttcaactggttcgacccc

SEQ ID NO: 128 - protein, 19 aa, synthetic construct
  REGION 1..19: note = Description of Artificial Sequence: Synthetic peptide
ARGTYYRDSSGKYFNWFDP

SEQ ID NO: 129 - DNA, 321 bp, synthetic construct
  misc_feature 1..321: note = Description of Artificial Sequence: Synthetic polynucleotide
  source 1..321: mol_type = other DNA
gacatccagatgacccagtctccatcttccgtgtctgcatctgtaggagacagagtcaccatcacttgtcgggcgagtcaggatattagcaactggttagcctggtatcagcagaaaccagggaaagcccctaagctcctgatctatgctgcatccagtttgcaaagtggggtcccatccaggttcagtggtagtggatctgggacagatttcactctctccatcagcagcctgcagtctgaagattttgcaacttactattgtcaacaggctaaaggtttccctcggacgttcggccaagggaccaaggtggaaatcaaa

SEQ ID NO: 130 - protein, 107 aa, synthetic construct
  REGION 1..107: note = Description of Artificial Sequence: Synthetic polypeptide
DIQMTQSPSSVSASVGDRVTITCRASQDISNWLAWYQQKPGKAPKLLIYAASSLQSGVPSRFSGSGSGTDFTLSISSLQSEDFATYYCQQAKGFPRTFGQGTKVEIK

SEQ ID NO: 131 - DNA, 18 bp, synthetic construct
  misc_feature 1..18: note = Description of Artificial Sequence: Synthetic oligonucleotide
  source 1..18: mol_type = other DNA
caggatattagcaactgg

SEQ ID NO: 132 - protein, 6 aa, synthetic construct
  REGION 1..6: note = Description of Artificial Sequence: Synthetic peptide
QDISNW

SEQ ID NO: 133-134 - skipped (2 entries)

SEQ ID NO: 135 - DNA, 27 bp, synthetic construct
  misc_feature 1..27: note = Description of Artificial Sequence: Synthetic oligonucleotide
  source 1..27: mol_type = other DNA
caacaggctaaaggtttccctcggacg

SEQ ID NO: 136 - protein, 9 aa, synthetic construct
  REGION 1..9: note = Description of Artificial Sequence: Synthetic peptide
QQAKGFPRT

SEQ ID NO: 137 - DNA, 375 bp, synthetic construct
  misc_feature 1..375: note = Description of Artificial Sequence: Synthetic polynucleotide
  source 1..375: mol_type = other DNA
caggtgcagctggtggagtctgggggaggcgtggtccagcctgggaggtccctgagactctcctgtgcagcctctggattcaccttcagtagctttggcatgcactgggtccgccaggctccaggcaaggggctggagtgggtgtcacttatatcatatgatggtgataataaatactatgtagactccgtgaagggccgattcaccatctccagagacaattccgagaacacgctgtatctgcaaatgaacaacctgcgacctgaggacacggctttctattactgtgcgaaagatggatttactagtggctggtacggctcctacaccggtttggacgtctggggccaagggaccacggtcaccgtctcctca

SEQ ID NO: 138 - protein, 125 aa, synthetic construct
  REGION 1..125: note = Description of Artificial Sequence: Synthetic polypeptide
QVQLVESGGGVVQPGRSLRLSCAASGFTFSSFGMHWVRQAPGKGLEWVSLISYDGDNKYYVDSVKGRFTISRDNSENTLYLQMNNLRPEDTAFYYCAKDGFTSGWYGSYTGLDVWGQGTTVTVSS

SEQ ID NO: 139 - DNA, 24 bp, synthetic construct
  misc_feature 1..24: note = Description of Artificial Sequence: Synthetic oligonucleotide
  source 1..24: mol_type = other DNA
ggattcaccttcagtagctttggc

SEQ ID NO: 140 - protein, 8 aa, synthetic construct
  REGION 1..8: note = Description of Artificial Sequence: Synthetic peptide
GFTFSSFG

SEQ ID NO: 141 - DNA, 24 bp, synthetic construct
  misc_feature 1..24: note = Description of Artificial Sequence: Synthetic oligonucleotide
  source 1..24: mol_type = other DNA
atatcatatgatggtgataataaa

SEQ ID NO: 142 - protein, 8 aa, synthetic construct
  REGION 1..8: note = Description of Artificial Sequence: Synthetic peptide
ISYDGDNK

SEQ ID NO: 143 - DNA, 54 bp, synthetic construct
  misc_feature 1..54: note = Description of Artificial Sequence: Synthetic oligonucleotide
  source 1..54: mol_type = other DNA
gcgaaagatggatttactagtggctggtacggctcctacaccggtttggacgtc

SEQ ID NO: 144 - protein, 18 aa, synthetic construct
  REGION 1..18: note = Description of Artificial Sequence: Synthetic peptide
AKDGFTSGWYGSYTGLDV

SEQ ID NO: 145 - DNA, 321 bp, synthetic construct
  misc_feature 1..321: note = Description of Artificial Sequence: Synthetic polynucleotide
  source 1..321: mol_type = other DNA
gacatccagatgacccagtctccatcctccctgtctgcatctgtaggagacagagtcaccatcacttgccgggcaagtcagggcattagaaatgatttaggctggtatcagcagaatccagggagagcccctaagcgcctgatctatgctgcatccagtttgcaaagtggggtcccatcaaggttcagcggcagtggatctgggacagaattcactctcacaatcagcagcctgcagcctgaagattttgcaacttattactgtcttcagtataatagttaccctcggacgttcggccaagggaccaaggtggaaatcaaa

SEQ ID NO: 146 - protein, 107 aa, synthetic construct
  REGION 1..107: note = Description of Artificial Sequence: Synthetic polypeptide
DIQMTQSPSSLSASVGDRVTITCRASQGIRNDLGWYQQNPGRAPKRLIYAASSLQSGVPSRFSGSGSGTEFTLTISSLQPEDFATYYCLQYNSYPRTFGQGTKVEIK

SEQ ID NO: 147 - DNA, 18 bp, synthetic construct
  misc_feature 1..18: note = Description of Artificial Sequence: Synthetic oligonucleotide
  source 1..18: mol_type = other DNA
cagggcattagaaatgat

SEQ ID NO: 148 - protein, 6 aa, synthetic construct
  REGION 1..6: note = Description of Artificial Sequence: Synthetic peptide
QGIRND

SEQ ID NO: 149-150 - skipped (2 entries)

SEQ ID NO: 151 - DNA, 27 bp, synthetic construct
  misc_feature 1..27: note = Description of Artificial Sequence: Synthetic oligonucleotide
  source 1..27: mol_type = other DNA
cttcagtataatagttaccctcggacg

SEQ ID NO: 152 - protein, 9 aa, synthetic construct
  REGION 1..9: note = Description of Artificial Sequence: Synthetic peptide
LQYNSYPRT

SEQ ID NO: 153 - DNA, 360 bp, synthetic construct
  misc_feature 1..360: note = Description of Artificial Sequence: Synthetic polynucleotide
  source 1..360: mol_type = other DNA
gaggtgcagctggtggagtctgggggaggctgggtacagcctggggggtccctgagactctcctgtgcagcctctggattcacattcagtaacttcgacatgcactgggtccgccaagctgcaggaaaaggtctggagtgggtctcaattattgatactggtggtgacacatactatccgggctccgtgaagggccgattcaccatatccagagaagatgccaagaactccttctatcttcaaatgaacagcctgagagccggggacacggctatatattactgtgtaagaggggggtataccagtggctgggactactttgactactggggccagggaaccctggtcaccgtctcctca

SEQ ID NO: 154 - protein, 120 aa, synthetic construct
  REGION 1..120: note = Description of Artificial Sequence: Synthetic polypeptide
EVQLVESGGGWVQPGGSLRLSCAASGFTFSNFDMHWVRQAAGKGLEWVSIIDTGGDTYYPGSVKGRFTISREDAKNSFYLQMNSLRAGDTAIYYCVRGGYTSGWDYFDYWGQGTLVTVSS

SEQ ID NO: 155 - DNA, 24 bp, synthetic construct
  misc_feature 1..24: note = Description of Artificial Sequence: Synthetic oligonucleotide
  source 1..24: mol_type = other DNA
ggattcacattcagtaacttcgac

SEQ ID NO: 156 - protein, 8 aa, synthetic construct
  REGION 1..8: note = Description of Artificial Sequence: Synthetic peptide
GFTFSNFD

SEQ ID NO: 157 - DNA, 21 bp, synthetic construct
  misc_feature 1..21: note = Description of Artificial Sequence: Synthetic oligonucleotide
  source 1..21: mol_type = other DNA
attgatactggtggtgacaca

SEQ ID NO: 158 - protein, 7 aa, synthetic construct
  REGION 1..7: note = Description of Artificial Sequence: Synthetic peptide
IDTGGDT

SEQ ID NO: 159 - DNA, 42 bp, synthetic construct
  misc_feature 1..42: note = Description of Artificial Sequence: Synthetic oligonucleotide
  source 1..42: mol_type = other DNA
gtaagaggggggtataccagtggctgggactactttgactac

SEQ ID NO: 160 - protein, 14 aa, synthetic construct
  REGION 1..14: note = Description of Artificial Sequence: Synthetic peptide
VRGGYTSGWDYFDY

SEQ ID NO: 161 - DNA, 321 bp, synthetic construct
  misc_feature 1..321: note = Description of Artificial Sequence: Synthetic polynucleotide
  source 1..321: mol_type = other DNA
gacatccagttgacccagtctccatccttcctgtctgcatctgtgggagacagagtcaccatcacttgctgggccagtcagggcattagcagttatttagcctggtatcagcaaaaaccagggaaagcccctaagctcctgatctatgctgcatccactttgcaaagtggggtcccatcaaggttcagcggcagtggatctgggacagaattcactctcacaatccgccgcctgcagcctgaagattttgcaagttattactgtcaacagcttaataattacccgtacacttttggccaggggaccaagctggagatcaaa

SEQ ID NO: 162 - protein, 107 aa, synthetic construct
  REGION 1..107: note = Description of Artificial Sequence: Synthetic polypeptide
DIQLTQSPSFLSASVGDRVTITCWASQGISSYLAWYQQKPGKAPKLLIYAASTLQSGVPSRFSGSGSGTEFTLTIRRLQPEDFASYYCQQLNNYPYTFGQGTKLEIK

SEQ ID NO: 163 - DNA, 18 bp, synthetic construct
  misc_feature 1..18: note = Description of Artificial Sequence: Synthetic oligonucleotide
  source 1..18: mol_type = other DNA
cagggcattagcagttat

SEQ ID NO: 164 - protein, 6 aa, synthetic construct
  REGION 1..6: note = Description of Artificial Sequence: Synthetic peptide
QGISSY

SEQ ID NO: 165-166 - skipped (2 entries)

SEQ ID NO: 167 - DNA, 27 bp, synthetic construct
  misc_feature 1..27: note = Description of Artificial Sequence: Synthetic oligonucleotide
  source 1..27: mol_type = other DNA
caacagcttaataattacccgtacact

SEQ ID NO: 168 - protein, 9 aa, synthetic construct
  REGION 1..9: note = Description of Artificial Sequence: Synthetic peptide
QQLNNYPYT

SEQ ID NO: 169 - DNA, 381 bp, synthetic construct
  misc_feature 1..381: note = Description of Artificial Sequence: Synthetic polynucleotide
  source 1..381: mol_type = other DNA
caggtgcagctggtggagtctgggggaggcgtggtccagcctgggaggtccctgagactctcctgtgcagcgtctggattcaccttcagtagctatggcatgcactgggtccgccaggctccaggcaaggggctggagtgggtggcagttatatggtatgatggaagtaataaatactatgcagactccgtgaagggccgattcaccatctccagagacaattccaagaacacgctgtatctgcaaatgaacagcctgagagccgaggacacggctgtgtattactgtgcgagagatggggtctacagtaactacggacgatactactactactacggtatggacgtctggggccaagggaccacggtcaccgtctcctca

SEQ ID NO: 170 - protein, 127 aa, synthetic construct
  REGION 1..127: note = Description of Artificial Sequence: Synthetic polypeptide
QVQLVESGGGVVQPGRSLRLSCAASGFTFSSYGMHWVRQAPGKGLEWVAVIWYDGSNKYYADSVKGRFTISRDNSKNTLYLQMNSLRAEDTAVYYCARDGVYSNYGRYYYYYGMDVWGQGTTVTVSS

SEQ ID NO: 171 - DNA, 24 bp, synthetic construct
  misc_feature 1..24: note = Description of Artificial Sequence: Synthetic oligonucleotide
  source 1..24: mol_type = other DNA
ggattcaccttcagtagctatggc

SEQ ID NO: 172 - protein, 8 aa, synthetic construct
  REGION 1..8: note = Description of Artificial Sequence: Synthetic peptide
GFTFSSYG

SEQ ID NO: 173 - DNA, 24 bp, synthetic construct
  misc_feature 1..24: note = Description of Artificial Sequence: Synthetic oligonucleotide
  source 1..24: mol_type = other DNA
atatggtatgatggaagtaataaa

SEQ ID NO: 174 - protein, 8 aa, synthetic construct
  REGION 1..8: note = Description of Artificial Sequence: Synthetic peptide
IWYDGSNK

SEQ ID NO: 175 - DNA, 60 bp, synthetic construct
  misc_feature 1..60: note = Description of Artificial Sequence: Synthetic oligonucleotide
  source 1..60: mol_type = other DNA
gcgagagatggggtctacagtaactacggacgatactactactactacggtatggacgtc

SEQ ID NO: 176 - protein, 20 aa, synthetic construct
  REGION 1..20: note = Description of Artificial Sequence: Synthetic peptide
ARDGVYSNYGRYYYYYGMDV

SEQ ID NO: 177 - DNA, 321 bp, synthetic construct
  misc_feature 1..321: note = Description of Artificial Sequence: Synthetic polynucleotide
  source 1..321: mol_type = other DNA
gacatccagatgacccagtctccatcctccctgtctgcatctgtaggagacagagtcaccatcacttgccgggcaagtcagagcatacgtagctttttaaattggtatcagcagaaaccagggaaagcccctaagttcctaatttctgctgcatccagtttgcaaagaggggtcccatctaggttcagtggcagtggatctgggacagatttcactctcaccatcagcagtctgcaacctgaggattcttcaacttactactgtcaacagagttacagtatcccggtcactttcggcggagggaccaaggtggagatcaaa

SEQ ID NO: 178 - protein, 107 aa, synthetic construct
  REGION 1..107: note = Description of Artificial Sequence: Synthetic polypeptide
DIQMTQSPSSLSASVGDRVTITCRASQSIRSFLNWYQQKPGKAPKFLISAASSLQRGVPSRFSGSGSGTDFTLTISSLQPEDSSTYYCQQSYSIPVTFGGGTKVEIK

SEQ ID NO: 179 - DNA, 18 bp, synthetic construct
  misc_feature 1..18: note = Description of Artificial Sequence: Synthetic oligonucleotide
  source 1..18: mol_type = other DNA
cagagcatacgtagcttt

SEQ ID NO: 180 - protein, 6 aa, synthetic construct
  REGION 1..6: note = Description of Artificial Sequence: Synthetic peptide
QSIRSF

SEQ ID NO: 181-182 - skipped (2 entries)

SEQ ID NO: 183 - DNA, 27 bp, synthetic construct
  misc_feature 1..27: note = Description of Artificial Sequence: Synthetic oligonucleotide
  source 1..27: mol_type = other DNA
caacagagttacagtatcccggtcact

SEQ ID NO: 184 - protein, 9 aa, synthetic construct
  REGION 1..9: note = Description of Artificial Sequence: Synthetic peptide
QQSYSIPVT

SEQ ID NO: 185 - DNA, 372 bp, synthetic construct
  misc_feature 1..372: note = Description of Artificial Sequence: Synthetic polynucleotide
  source 1..372: mol_type = other DNA
caggtacagctgcagcagtcaggtccaggactggtgaagccctcgcagaccctctcactcacctgtgccatctccggggacagtgtctctagcaacagtgctgcttggaactggatcaggcagtccccatcgagaggccttgagtggctgggaaggacatactacaggtccaagtggtataatgattatgtagtatctgtgaaaagtcgaataatcttcaacccagacacatccaagaaccagttctccctgcagctgaactctgtgactcccgaggacacggctgtgtattactgtgcaagagtgaggcaggattatagaagtggcccgtttgactactggggccagggaaccctggtcaccgtctcctca

SEQ ID NO: 186 - protein, 124 aa, synthetic construct
  REGION 1..124: note = Description of Artificial Sequence: Synthetic polypeptide
QVQLQQSGPGLVKPSQTLSLTCAISGDSVSSNSAAWNWIRQSPSRGLEWLGRTYYRSKWYNDYVVSVKSRIIFNPDTSKNQFSLQLNSVTPEDTAVYYCARVRQDYRSGPFDYWGQGTLVTVSS

SEQ ID NO: 187 - DNA, 30 bp, synthetic construct; identical to SEQ ID NO: 3
  misc_feature 1..30: note = Description of Artificial Sequence: Synthetic oligonucleotide
  source 1..30: mol_type = other DNA

SEQ ID NO: 188 - protein, 10 aa, synthetic construct
  REGION 1..10: note = Description of Artificial Sequence: Synthetic peptide
GDSVSSNSAA

SEQ ID NO: 189 - DNA, 27 bp, synthetic construct
  misc_feature 1..27: note = Description of Artificial Sequence: Synthetic oligonucleotide
  source 1..27: mol_type = other DNA
acatactacaggtccaagtggtataat

SEQ ID NO: 190 - protein, 9 aa, synthetic construct
  REGION 1..9: note = Description of Artificial Sequence: Synthetic peptide
TYYRSKWYN

SEQ ID NO: 191 - DNA, 42 bp, synthetic construct
  misc_feature 1..42: note = Description of Artificial Sequence: Synthetic oligonucleotide
  source 1..42: mol_type = other DNA
gcaagagtgaggcaggattatagaagtggcccgtttgactac

SEQ ID NO: 192 - protein, 14 aa, synthetic construct
  REGION 1..14: note = Description of Artificial Sequence: Synthetic peptide
ARVRQDYRSGPFDY

SEQ ID NO: 193 - DNA, 321 bp, synthetic construct
  misc_feature 1..321: note = Description of Artificial Sequence: Synthetic polynucleotide
  source 1..321: mol_type = other DNA
gaaatagtgatgacgcagtctccagtcaccctgtctgtgtctccaggggaaagagccaccctctcctgttgggccagtcagagtgttagcagcagcttagcctggtaccagcagaaacctggccaggctcccagactcctcatctatggtgcatccaccagggccactggtatcccagccaggttcagtggcagtgggtctgggacagggttcactctcaccatcagcagcctgcagtctgaagattttgcagtttattactgtcagcagtataataactggccattcactttcggccctgggaccaaagtggatatcaaa

SEQ ID NO: 194 - protein, 107 aa, synthetic construct
  REGION 1..107: note = Description of Artificial Sequence: Synthetic polypeptide
EIVMTQSPVTLSVSPGERATLSCWASQSVSSSLAWYQQKPGQAPRLLIYGASTRATGIPARFSGSGSGTGFTLTISSLQSEDFAVYYCQQYNNWPFTFGPGTKVDIK

SEQ ID NO: 195 - DNA, 18 bp, synthetic construct
  misc_feature 1..18: note = Description of Artificial Sequence: Synthetic oligonucleotide
  source 1..18: mol_type = other DNA
cagagtgttagcagcagc

SEQ ID NO: 196 - protein, 6 aa, synthetic construct
  REGION 1..6: note = Description of Artificial Sequence: Synthetic peptide
QSVSSS

SEQ ID NO: 197-198 - skipped (2 entries)

SEQ ID NO: 199 - DNA, 27 bp, synthetic construct
  misc_feature 1..27: note = Description of Artificial Sequence: Synthetic oligonucleotide
  source 1..27: mol_type = other DNA
cagcagtataataactggccattcact

SEQ ID NO: 200 - protein, 9 aa, synthetic construct
  REGION 1..9: note = Description of Artificial Sequence: Synthetic peptide
QQYNNWPFT

SEQ ID NO: 201 - DNA, 354 bp, synthetic construct
  misc_feature 1..354: note = Description of Artificial Sequence: Synthetic polynucleotide
  source 1..354: mol_type = other DNA
gaggtgcagctgttggagtctgggggaggcttggtacagcctggggggtccctgagactctcctgtgcagcctctggattcacctttagcagctatgccatgagctgggtccgccaggctccagggaaggggctggagtgggtctcagttattagtggtagtggtggtagcacatactacgcagactccgtgaagggccggttcaccatctccagagacaattccaagaacacgctgtatctgcaaatgaacagcctgagagccgaggacacggccgtatattactgtgcgaaagagcagtatagccggggctttgactactggggccagggaaccctggtcaccgtctcctca

SEQ ID NO: 202 - protein, 118 aa, synthetic construct
  REGION 1..118: note = Description of Artificial Sequence: Synthetic polypeptide
EVQLLESGGGLVQPGGSLRLSCAASGFTFSSYAMSWVRQAPGKGLEWVSVISGSGGSTYYADSVKGRFTISRDNSKNTLYLQMNSLRAEDTAVYYCAKEQYSRGFDYWGQGTLVTVSS

SEQ ID NO: 203 - DNA, 24 bp, synthetic construct
  misc_feature 1..24: note = Description of Artificial Sequence: Synthetic oligonucleotide
  source 1..24: mol_type = other DNA
ggattcacctttagcagctatgcc

SEQ ID NO: 204 - protein, 8 aa, synthetic construct
  REGION 1..8: note = Description of Artificial Sequence: Synthetic peptide
GFTFSSYA

SEQ ID NO: 205 - DNA, 24 bp, synthetic construct
  misc_feature 1..24: note = Description of Artificial Sequence: Synthetic oligonucleotide
  source 1..24: mol_type = other DNA
attagtggtagtggtggtagcaca

SEQ ID NO: 206 - protein, 8 aa, synthetic construct
  REGION 1..8: note = Description of Artificial Sequence: Synthetic peptide
ISGSGGST

SEQ ID NO: 207 - DNA, 33 bp, synthetic construct
  misc_feature 1..33: note = Description of Artificial Sequence: Synthetic oligonucleotide
  source 1..33: mol_type = other DNA
gcgaaagagcagtatagccggggctttgactac

SEQ ID NO: 208 - protein, 11 aa, synthetic construct
  REGION 1..11: note = Description of Artificial Sequence: Synthetic peptide
AKEQYSRGFDY

SEQ ID NO: 209 - DNA, 318 bp, synthetic construct
  misc_feature 1..318: note = Description of Artificial Sequence: Synthetic polynucleotide
  source 1..318: mol_type = other DNA
gacatccagatgacccagtctccttccaccctgtctgtatctgtaggagacagagtcaccatcacttgccgggccagtcagagtattagtagttggttggcctggtatcagcagaaaccagggaaagcccctaagctcctgatctataaggcgtctagtttagaaagtggggtcccatcaaggttcagcggcagtggatctgggacagaattcactctcaccatcagcagcctgcagcctgatgattttgcaacttattactgccaacagtataatagttattggacgttcggccaagggaccaaggtggaaatcaaa

SEQ ID NO: 210 - protein, 106 aa, synthetic construct
  REGION 1..106: note = Description of Artificial Sequence: Synthetic polypeptide
DIQMTQSPSTLSVSVGDRVTITCRASQSISSWLAWYQQKPGKAPKLLIYKASSLESGVPSRFSGSGSGTEFTLTISSLQPDDFATYYCQQYNSYWTFGQGTKVEIK

SEQ ID NO: 211 - DNA, 18 bp, synthetic construct
  misc_feature 1..18: note = Description of Artificial Sequence: Synthetic oligonucleotide
  source 1..18: mol_type = other DNA
cagagtattagtagttgg

SEQ ID NO: 212 - protein, 6 aa, synthetic construct
  REGION 1..6: note = Description of Artificial Sequence: Synthetic peptide
QSISSW

SEQ ID NO: 213-214 - skipped (2 entries)

SEQ ID NO: 215 - DNA, 24 bp, synthetic construct
  misc_feature 1..24: note = Description of Artificial Sequence: Synthetic oligonucleotide
  source 1..24: mol_type = other DNA
caacagtataatagttattggacg

SEQ ID NO: 216 - protein, 8 aa, synthetic construct
  REGION 1..8: note = Description of Artificial Sequence: Synthetic peptide
QQYNSYWT

SEQ ID NO: 217 - DNA, 345 bp, synthetic construct
  misc_feature 1..345: note = Description of Artificial Sequence: Synthetic polynucleotide
  source 1..345: mol_type = other DNA
caggtgcagctggtggagtctgggggaggcgtggtccagcctgggaggtccctgagactctcctgtgtagcctctggattcaccatcagtagctatggcatgaactgggtccgccaggctccaggcaaggggctggagtgggtggcagttatatcatatgatggaggtaataaatactctgtagactccgtgaagggccgattcaccatctccagagacaattccaagaatacgctgtatctgcaaatgaacagcctgagagctgaggactcggctgtttattactgtgcgagaggaaggtacttcgatctctggggccgtggcaccctggtcactgtctcctca

SEQ ID NO: 218 - protein, 115 aa, synthetic construct
  REGION 1..115: note = Description of Artificial Sequence: Synthetic polypeptide
QVQLVESGGGVVQPGRSLRLSCVASGFTISSYGMNWVRQAPGKGLEWVAVISYDGGNKYSVDSVKGRFTISRDNSKNTLYLQMNSLRAEDSAVYYCARGRYFDLWGRGTLVTVSS

SEQ ID NO: 219 - DNA, 24 bp, synthetic construct
  misc_feature 1..24: note = Description of Artificial Sequence: Synthetic oligonucleotide
  source 1..24: mol_type = other DNA
ggattcaccatcagtagctatggc

SEQ ID NO: 220 - protein, 8 aa, synthetic construct
  REGION 1..8: note = Description of Artificial Sequence: Synthetic peptide
GFTISSYG

SEQ ID NO: 221 - DNA, 24 bp, synthetic construct
  misc_feature 1..24: note = Description of Artificial Sequence: Synthetic oligonucleotide
  source 1..24: mol_type = other DNA
atatcatatgatggaggtaataaa

SEQ ID NO: 222 - protein, 8 aa, synthetic construct
  REGION 1..8: note = Description of Artificial Sequence: Synthetic peptide
ISYDGGNK

SEQ ID NO: 223 - DNA, 24 bp, synthetic construct
  misc_feature 1..24: note = Description of Artificial Sequence: Synthetic oligonucleotide
  source 1..24: mol_type = other DNA
gcgagaggaaggtacttcgatctc

SEQ ID NO: 224 - protein, 8 aa, synthetic construct
  REGION 1..8: note = Description of Artificial Sequence: Synthetic peptide
ARGRYFDL

SEQ ID NO: 225 - DNA, 321 bp, synthetic construct
  misc_feature 1..321: note = Description of Artificial Sequence: Synthetic polynucleotide
  source 1..321: mol_type = other DNA
gacatccagatgacccagtctccttccaccctgtctgcatctgtaggagacagagtcaccatcacttgccgggccagtcagagtattagtagctggttggcctggtatcagcagaaaccagggagagcccctaacctcctgatctctaaggcgtctagtttaaaaagtggggtcccatcaaggttcagcggcagtggatctgggacagaattcactctcaccgtcagcagcctgcagcctgatgattttgcaacttattactgccaacagtattatagttattcttacacttttggccaggggaccaagctggagatcaaa

SEQ ID NO: 226 - protein, 107 aa, synthetic construct
  REGION 1..107: note = Description of Artificial Sequence: Synthetic polypeptide
DIQMTQSPSTLSASVGDRVTITCRASQSISSWLAWYQQKPGRAPNLLISKASSLKSGVPSRFSGSGSGTEFTLTVSSLQPDDFATYYCQQYYSYSYTFGQGTKLEIK

SEQ ID NO: 227 - DNA, 18 bp, synthetic construct
  misc_feature 1..18: note = Description of Artificial Sequence: Synthetic oligonucleotide
  source 1..18: mol_type = other DNA
cagagtattagtagctgg

SEQ ID NO: 228 - protein, 6 aa, synthetic construct
  REGION 1..6: note = Description of Artificial Sequence: Synthetic peptide
QSISSW

SEQ ID NO: 229-230 - skipped (2 entries)

SEQ ID NO: 231 - DNA, 27 bp, synthetic construct
  misc_feature 1..27: note = Description of Artificial Sequence: Synthetic oligonucleotide
  source 1..27: mol_type = other DNA
caacagtattatagttattcttacact

SEQ ID NO: 232 - protein, 9 aa, synthetic construct
  REGION 1..9: note = Description of Artificial Sequence: Synthetic peptide
QQYYSYSYT

SEQ ID NO: 233 - DNA, 360 bp, synthetic construct
  misc_feature 1..360: note = Description of Artificial Sequence: Synthetic polynucleotide
  source 1..360: mol_type = other DNA
caggtgcagctgcaggagtcgggcccaggactggtgaagccttcacagaccctgtccctcacctgcactgtctctggtggctccatcagcagtggtggttactactggagctggatccgccagcacccagggaagggcctggagtggattgggtacatctattacagtgggagcacctactacaacccgtccctcaagagtcgagtcaccatatcagtagacacgtctaagaaccagttctccctgaagctgaactctgtgactgccgcggacacggccgtgtattactgtgcgagggacgacggtgactactacggtatggacgtctggggccaagggaccacggtcaccgtctcctca

SEQ ID NO: 234 - protein, 120 aa, synthetic construct
  REGION 1..120: note = Description of Artificial Sequence: Synthetic polypeptide
QVQLQESGPGLVKPSQTLSLTCTVSGGSISSGGYYWSWIRQHPGKGLEWIGYIYYSGSTYYNPSLKSRVTISVDTSKNQFSLKLNSVTAADTAVYYCARDDGDYYGMDVWGQGTTVTVSS

SEQ ID NO: 235 - DNA, 30 bp, synthetic construct
  misc_feature 1..30: note = Description of Artificial Sequence: Synthetic oligonucleotide
  source 1..30: mol_type = other DNA
ggtggctccatcagcagtggtggttactac

SEQ ID NO: 236 - protein, 10 aa, synthetic construct
  REGION 1..10: note = Description of Artificial Sequence: Synthetic peptide
GGSISSGGYY

SEQ ID NO: 237 - DNA, 21 bp, synthetic construct
  misc_feature 1..21: note = Description of Artificial Sequence: Synthetic oligonucleotide
  source 1..21: mol_type = other DNA
atctattacagtgggagcacc

SEQ ID NO: 238 - protein, 7 aa, synthetic construct
  REGION 1..7: note = Description of Artificial Sequence: Synthetic peptide
IYYSGST

SEQ ID NO: 239 - DNA, 36 bp, synthetic construct
  misc_feature 1..36: note = Description of Artificial Sequence: Synthetic oligonucleotide
  source 1..36: mol_type = other DNA
gcgagggacgacggtgactactacggtatggacgtc

SEQ ID NO: 240 - protein, 12 aa, synthetic construct
  REGION 1..12: note = Description of Artificial Sequence: Synthetic peptide
ARDDGDYYGMDV

SEQ ID NO: 241 - DNA, 324 bp, synthetic construct
  misc_feature 1..324: note = Description of Artificial Sequence: Synthetic polynucleotide
  source 1..324: mol_type = other DNA
gaaattgtgttgacacagtctccagccaccctgtctttgtctccaggggaaagagccaccctctcctgcagggccagtcagactgttagcagctacttagcctggtaccaacagaaacctggccaggctcccaggctcctcatctatgatgcatccaacagggccactggcatcccagccaggttcagtggcagtgggtctgggacagacttcactctcaccatcagcagcctagagcctgaagattttgcagtttattactgtcagcagcgtagcaactggcctccattcactttcggccctgggaccaaagtggatatcaaa

SEQ ID NO: 242 - protein, 108 aa, synthetic construct
  REGION 1..108: note = Description of Artificial Sequence: Synthetic polypeptide
EIVLTQSPATLSLSPGERATLSCRASQTVSSYLAWYQQKPGQAPRLLIYDASNRATGIPARFSGSGSGTDFTLTISSLEPEDFAVYYCQQRSNWPPFTFGPGTKVDIK

SEQ ID NO: 243 - DNA, 18 bp, synthetic construct
  misc_feature 1..18: note = Description of Artificial Sequence: Synthetic oligonucleotide
  source 1..18: mol_type = other DNA
cagactgttagcagctac

SEQ ID NO: 244 - protein, 6 aa, synthetic construct
  REGION 1..6: note = Description of Artificial Sequence: Synthetic peptide
QTVSSY

SEQ ID NO: 245-246 - skipped (2 entries)

SEQ ID NO: 247 - DNA, 30 bp, synthetic construct
  misc_feature 1..30: note = Description of Artificial Sequence: Synthetic oligonucleotide
  source 1..30: mol_type = other DNA
cagcagcgtagcaactggcctccattcact

SEQ ID NO: 248 - protein, 10 aa, synthetic construct
  REGION 1..10: note = Description of Artificial Sequence: Synthetic peptide
QQRSNWPPFT

SEQ ID NO: 249 - DNA, 399 bp, synthetic construct
  misc_feature 1..399: note = Description of Artificial Sequence: Synthetic polynucleotide
  source 1..399: mol_type = other DNA
caggtacagctgcagcagtcaggtccaggactggtgaagccctcgcagaccctctcactcacctgtgccatctccggggacagtgtctctagtaatcgtgctgcttggaactggatcaggcagtccccatcgagaggccttcagtggctgggaaggacatactataggtccaagtggtataatgattatgcagtatctctgagaagtcgaataaccatcaacccagtcacatccaagaaccaggtcgccctgcatatgaactctgtgactcccgaggacacggctgtgtattactgtgcaagggcgggaattgttgtagtgccaggtccggaaactttctactattatgatcacggtttggacgtctggggccaagggaccacggtcaccgtctcctca

SEQ ID NO: 250 - protein, 133 aa, synthetic construct
  REGION 1..133: note = Description of Artificial Sequence: Synthetic polypeptide
QVQLQQSGPGLVKPSQTLSLTCAISGDSVSSNRAAWNWIRQSPSRGLQWLGRTYYRSKWYNDYAVSLRSRITINPVTSKNQVALHMNSVTPEDTAVYYCARAGIVVVPGPETFYYYDHGLDVWGQGTTVTVSS

SEQ ID NO: 251 - DNA, 30 bp, synthetic construct
  misc_feature 1..30: note = Description of Artificial Sequence: Synthetic oligonucleotide
  source 1..30: mol_type = other DNA
ggggacagtgtctctagtaatcgtgctgct

SEQ ID NO: 252 - protein, 10 aa, synthetic construct
  REGION 1..10: note = Description of Artificial Sequence: Synthetic peptide
GDSVSSNRAA

SEQ ID NO: 253 - DNA, 27 bp, synthetic construct
  misc_feature 1..27: note = Description of Artificial Sequence: Synthetic oligonucleotide
  source 1..27: mol_type = other DNA
acatactataggtccaagtggtataat

SEQ ID NO: 254 - protein, 9 aa, synthetic construct
  REGION 1..9: note = Description of Artificial Sequence: Synthetic peptide
TYYRSKWYN

SEQ ID NO: 255 - DNA, 69 bp, synthetic construct
  misc_feature 1..69: note = Description of Artificial Sequence: Synthetic oligonucleotide
  source 1..69: mol_type = other DNA
gcaagggcgggaattgttgtagtgccaggtccggaaactttctactattatgatcacggtttggacgtc

SEQ ID NO: 256 - protein, 23 aa, synthetic construct
  REGION 1..23: note = Description of Artificial Sequence: Synthetic peptide
ARAGIVVVPGPETFYYYDHGLDV

SEQ ID NO: 257 - DNA, 324 bp, synthetic construct
  misc_feature 1..324: note = Description of Artificial Sequence: Synthetic polynucleotide
  source 1..324: mol_type = other DNA
gacatccagatgacccagtctccatcctccctgtctgcatctgtaggagacagagtcaccatcacttgccgggcaagtcagagcattagaagctatttaaattggtatcagcagaaaccagggaaagcccctgagctcctgatccatgctgcatccagtttgcaaagtggggtcccttcaaggttcagtggcagtggatctgggacagatttcactctcaccatcagcagtctgcaacctgaagattttgcaagttattactgtcaacagagttacagtgcccctccgatcaccttcggccaagggacacgactggagattaaa

SEQ ID NO: 258 - protein, 108 aa, synthetic construct
  REGION 1..108: note = Description of Artificial Sequence: Synthetic polypeptide
DIQMTQSPSSLSASVGDRVTITCRASQSIRSYLNWYQQKPGKAPELLIHAASSLQSGVPSRFSGSGSGTDFTLTISSLQPEDFASYYCQQSYSAPPITFGQGTRLEIK

SEQ ID NO: 259 - DNA, 18 bp, synthetic construct
  misc_feature 1..18: note = Description of Artificial Sequence: Synthetic oligonucleotide
  source 1..18: mol_type = other DNA
cagagcattagaagctat

SEQ ID NO: 260 - protein, 6 aa, synthetic construct
  REGION 1..6: note = Description of Artificial Sequence: Synthetic peptide
QSIRSY

SEQ ID NO: 261-262 - skipped (2 entries)

SEQ ID NO: 263 - DNA, 30 bp, synthetic construct
  misc_feature 1..30: note = Description of Artificial Sequence: Synthetic oligonucleotide
  source 1..30: mol_type = other DNA
caacagagttacagtgcccctccgatcacc

SEQ ID NO: 264 - protein, 10 aa, synthetic construct
  REGION 1..10: note = Description of Artificial Sequence: Synthetic peptide
QQSYSAPPIT

SEQ ID NO: 265 - DNA, 399 bp, synthetic construct
  misc_feature 1..399: note = Description of Artificial Sequence: Synthetic polynucleotide
  source 1..399: mol_type = other DNA
caggtccagctgcagcagtcaggtccaggactggtgaagccctcgcaggccctctcactcacctgtgccatctccggggacagtgtctccagcaacagtgctgcttggaactggatcaggcagtccccctcgagaggccttgagtggctgggaaggacatattataggtccaagtggtataatgattatgcagtgtctgtgaaaagtcgaataaccatcaacccagacacatccaagaaccacttctccctgcacctgaattctatgactcccgaggacacggctgtgtattactgtgcaagggcgagaattgtagtcgttccaggtccggaggtttattactactactactacgatatggacgtctggggccaagggaccacggtcaccgtctcctca

SEQ ID NO: 266 - protein, 133 aa, synthetic construct
  REGION 1..133: note = Description of Artificial Sequence: Synthetic polypeptide
QVQLQQSGPGLVKPSQALSLTCAISGDSVSSNSAAWNWIRQSPSRGLEWLGRTYYRSKWYNDYAVSVKSRITINPDTSKNHFSLHLNSMTPEDTAVYYCARARIVVVPGPEVYYYYYYDMDVWGQGTTVTVSS

SEQ ID NO: 267 - DNA, 30 bp, synthetic construct
  misc_feature 1..30: note = Description of Artificial Sequence: Synthetic oligonucleotide
  source 1..30: mol_type = other DNA
ggggacagtgtctccagcaacagtgctgct

SEQ ID NO: 268 - protein, 10 aa, synthetic construct
  REGION 1..10: note = Description of Artificial Sequence: Synthetic peptide
GDSVSSNSAA

SEQ ID NO: 269 - DNA, 27 bp, synthetic construct
  misc_feature 1..27: note = Description of Artificial Sequence: Synthetic oligonucleotide
  source 1..27: mol_type = other DNA
acatattataggtccaagtggtataat

SEQ ID NO: 270 - protein, 9 aa, synthetic construct
  REGION 1..9: note = Description of Artificial Sequence: Synthetic peptide
TYYRSKWYN

SEQ ID NO: 271 - DNA, 69 bp, synthetic construct
  misc_feature 1..69: note = Description of Artificial Sequence: Synthetic oligonucleotide
  source 1..69: mol_type = other DNA
gcaagggcgagaattgtagtcgttccaggtccggaggtttattactactactactacgatatggacgtc

SEQ ID NO: 272 - protein, 23 aa, synthetic construct
  REGION 1..23: note = Description of Artificial Sequence: Synthetic peptide
ARARIVVVPGPEVYYYYYYDMDV

SEQ ID NO: 273 - DNA, 324 bp, synthetic construct
  misc_feature 1..324: note = Description of Artificial Sequence: Synthetic polynucleotide
  source 1..324: mol_type = other DNA
gacatccagatgacccagtctccatcctccctgtctgcatctgtaggagacagagtcaccatcacttgccgggcaagtcagagcattagaagctatttaaattggtatcagcagaaaccagggaaagcccctaagctcctgatctatgctgcatccagtttgcaaagtggggtcccatcaaggttcagtggcagtggatctgggacagatttcactctcaccatcagcagtctgcaacctgaagattttgcaacttactactgtcaacagagttacagtagccctccgatcaccttcggccaagggacacgactggagattaaa

SEQ ID NO: 274 - protein, 108 aa, synthetic construct
  REGION 1..108: note = Description of Artificial Sequence: Synthetic polypeptide
DIQMTQSPSSLSASVGDRVTITCRASQSIRSYLNWYQQKPGKAPKLLIYAASSLQSGVPSRFSGSGSGTDFTLTISSLQPEDFATYYCQQSYSSPPITFGQGTRLEIK

SEQ ID NO: 275 - DNA, 18 bp, synthetic construct
  misc_feature 1..18: note = Description of Artificial Sequence: Synthetic oligonucleotide
  source 1..18: mol_type = other DNA
cagagcattagaagctat

SEQ ID NO: 276 - protein, 6 aa, synthetic construct
  REGION 1..6: note = Description of Artificial Sequence: Synthetic peptide
QSIRSY

SEQ ID NO: 277-278 - skipped (2 entries)

SEQ ID NO: 279 - DNA, 30 bp, synthetic construct
  misc_feature 1..30: note = Description of Artificial Sequence: Synthetic oligonucleotide
  source 1..30: mol_type = other DNA
caacagagttacagtagccctccgatcacc

SEQ ID NO: 280 - protein, 10 aa, synthetic construct
  REGION 1..10: note = Description of Artificial Sequence: Synthetic peptide
QQSYSSPPIT

SEQ ID NO: 281 - DNA, 399 bp, synthetic construct
  misc_feature 1..399: note = Description of Artificial Sequence: Synthetic polynucleotide
  source 1..399: mol_type = other DNA
caggtacagctgcagcagtcaggtccaggactggtgaagccctcgcagaccctctcactcacctgtgtcatctccggggacagtgtctctactaatagtgctgcttggaactggatcaggcagtccccatcgagaggccttgagtggctgggaaggacatattataggtccaagtggtataatgattatgcagtatctgtgagaagtcgaataaccatcaacccagtcacatccaagaaccaggtcgccctgcatctgaactctgtgactcccgaggacacggctgtgtattactgtgcaagggcgggaattgttgtggtgccaggtccggaaacttattactattattatcacggtttggacgtctggggccaagggaccacggtcaccgtctcctca

SEQ ID NO: 282 - protein, 133 aa, synthetic construct
  REGION 1..133: note = Description of Artificial Sequence: Synthetic polypeptide
QVQLQQSGPGLVKPSQTLSLTCVISGDSVSTNSAAWNWIRQSPSRGLEWLGRTYYRSKWYNDYAVSVRSRITINPVTSKNQVALHLNSVTPEDTAVYYCARAGIVVVPGPETYYYYYHGLDVWGQGTTVTVSS

SEQ ID NO: 283 - DNA, 30 bp, synthetic construct
  misc_feature 1..30: note = Description of Artificial Sequence: Synthetic oligonucleotide
  source 1..30: mol_type = other DNA
ggggacagtgtctctactaatagtgctgct

SEQ ID NO: 284 - protein, 10 aa, synthetic construct
  REGION 1..10: note = Description of Artificial Sequence: Synthetic peptide
GDSVSTNSAA

SEQ ID NO: 285 - DNA, 27 bp, synthetic construct
  misc_feature 1..27: note = Description of Artificial Sequence: Synthetic oligonucleotide
  source 1..27: mol_type = other DNA
acatattataggtccaagtggtataat

SEQ ID NO: 286 - protein, 9 aa, synthetic construct
  REGION 1..9: note = Description of Artificial Sequence: Synthetic peptide
TYYRSKWYN

SEQ ID NO: 287 - DNA, 69 bp, synthetic construct
  misc_feature 1..69: note = Description of Artificial Sequence: Synthetic oligonucleotide
  source 1..69: mol_type = other DNA
gcaagggcgggaattgttgtggtgccaggtccggaaacttattactattattatcacggtttggacgtc

SEQ ID NO: 288 - protein, 23 aa, synthetic construct
  REGION 1..23: note = Description of Artificial Sequence: Synthetic peptide
ARAGIVVVPGPETYYYYYHGLDV

SEQ ID NO: 289 - DNA, 324 bp, synthetic construct
  misc_feature 1..324: note = Description of Artificial Sequence: Synthetic polynucleotide
  source 1..324: mol_type = other DNA
gacatccagatgacccagtctccatcctccctgtctgcatctgtaggagacagagtcaccatcacttgccgggcaagtcagaacattagaagctatttaaattggtatcagcagaaaccagggaaagcccctaagctcctgatccatgttgcatccagtttgcaaagtggggtcccatcaaggttcagtggcagtggatctgggacagatttcactctcaccatcagcagtctgcaacctgaagattttgcaacttactactgtcaacagagttacagtacccctccgatcaccttcggccacgggacacgactggaaattaaa

SEQ ID NO: 290 - protein, 108 aa, synthetic construct
  REGION 1..108: note = Description of Artificial Sequence: Synthetic polypeptide
DIQMTQSPSSLSASVGDRVTITCRASQNIRSYLNWYQQKPGKAPKLLIHVASSLQSGVPSRFSGSGSGTDFTLTISSLQPEDFATYYCQQSYSTPPITFGHGTRLEIK

SEQ ID NO: 291 - DNA, 18 bp, synthetic construct
  misc_feature 1..18: note = Description of Artificial Sequence: Synthetic oligonucleotide
  source 1..18: mol_type = other DNA
cagaacattagaagctat

SEQ ID NO: 292 - protein, 6 aa, synthetic construct
  REGION 1..6: note = Description of Artificial Sequence: Synthetic peptide
QNIRSY

SEQ ID NO: 293-294 - skipped (2 entries)

SEQ ID NO: 295 - DNA, 30 bp, synthetic construct; identical to SEQ ID NO: 15
  misc_feature 1..30: note = Description of Artificial Sequence: Synthetic oligonucleotide
  source 1..30: mol_type = other DNA

SEQ ID NO: 296 - protein, 10 aa, synthetic construct
  REGION 1..10: note = Description of Artificial Sequence: Synthetic peptide
QQSYSTPPIT

SEQ ID NO: 297 - DNA, 348 bp, synthetic construct
  misc_feature 1..348: note = Description of Artificial Sequence: Synthetic polynucleotide
  source 1..348: mol_type = other DNA
cagctgcagctgcaggagtcgggcccaggactggtgaagccttcggagaccctgtccctcacctgcactgtctctggtggctccctcagcagtaatagttactactggggctggatccgccagcccccagggaaggggctggagtggattgggagtatctattatagtgggagcacctactacaacccgtccctcaagagtcgagtcaccatatccgtagacacgtcccagaaccagttctccctgaagctgagctctgtgaccgccgcagacacggctgtgtattactgtgcgagacagaactactttgactactggggccagggaaccctggtcaccgtctcctca

SEQ ID NO: 298 - protein, 116 aa, synthetic construct
  REGION 1..116: note = Description of Artificial Sequence: Synthetic polypeptide
QLQLQESGPGLVKPSETLSLTCTVSGGSLSSNSYYWGWIRQPPGKGLEWIGSIYYSGSTYYNPSLKSRVTISVDTSQNQFSLKLSSVTAADTAVYYCARQNYFDYWGQGTLVTVSS

SEQ ID NO: 299 - DNA, 30 bp, synthetic construct
  misc_feature 1..30: note = Description of Artificial Sequence: Synthetic oligonucleotide
  source 1..30: mol_type = other DNA
ggtggctccctcagcagtaatagttactac

SEQ ID NO: 300 - protein, 10 aa, synthetic construct
  REGION 1..10: note = Description of Artificial Sequence: Synthetic peptide
GGSLSSNSYY

SEQ ID NO: 301 - DNA, 21 bp, synthetic construct
  misc_feature 1..21: note = Description of Artificial Sequence: Synthetic oligonucleotide
  source 1..21: mol_type = other DNA
atctattatagtgggagcacc

SEQ ID NO: 302 - protein, 7 aa, synthetic construct
  REGION 1..7: note = Description of Artificial Sequence: Synthetic peptide
IYYSGST

SEQ ID NO: 303 - DNA, 24 bp, synthetic construct
  misc_feature 1..24: note = Description of Artificial Sequence: Synthetic oligonucleotide
  source 1..24: mol_type = other DNA
gcgagacagaactactttgactac

SEQ ID NO: 304 - protein, 8 aa, synthetic construct
  REGION 1..8: note = Description of Artificial Sequence: Synthetic peptide
ARQNYFDY

SEQ ID NO: 305 - DNA, 321 bp, synthetic construct
  misc_feature 1..321: note = Description of Artificial Sequence: Synthetic polynucleotide
  source 1..321: mol_type = other DNA
gacatccagttgacccagtctccatccttcctgtctgcatctgtaggagacagagtcaccatcacttgctgggccagtcagggcattagcaggtatttagcctggtatcagcaaaaaccagggaaagcccctaagctcctgatctatgctgcatccactttgcaaagtggggtcccatcaaggttcagcggcagtggatctgggacagaattcactctcacaatcagcagcctgcagcctgaagattttgcaacttattactgtcaacagcttaatagttatcctctcactttcggccctgggaccaaactggatatcaaa

SEQ ID NO: 306 - protein, 107 aa, synthetic construct
  REGION 1..107: note = Description of Artificial Sequence: Synthetic polypeptide
DIQLTQSPSFLSASVGDRVTITCWASQGISRYLAWYQQKPGKAPKLLIYAASTLQSGVPSRFSGSGSGTEFTLTISSLQPEDFATYYCQQLNSYPLTFGPGTKLDIK

SEQ ID NO: 307 - DNA, 18 bp, synthetic construct
  misc_feature 1..18: note = Description of Artificial Sequence: Synthetic oligonucleotide
  source 1..18: mol_type = other DNA
cagggcattagcaggtat

SEQ ID NO: 308 - protein, 6 aa, synthetic construct
  REGION 1..6: note = Description of Artificial Sequence: Synthetic peptide
QGISRY

SEQ ID NO: 309-310 - skipped (2 entries)

SEQ ID NO: 311 - DNA, 27 bp, synthetic construct
  misc_feature 1..27: note = Description of Artificial Sequence: Synthetic oligonucleotide
  source 1..27: mol_type = other DNA
caacagcttaatagttatcctctcact

SEQ ID NO: 312 - protein, 9 aa, synthetic construct
  REGION 1..9: note = Description of Artificial Sequence: Synthetic peptide
QQLNSYPLT

SEQ ID NO: 313 - DNA, 345 bp, synthetic construct
  misc_feature 1..345: note = Description of Artificial Sequence: Synthetic polynucleotide
  source 1..345: mol_type = other DNA
caggtgcagctggtggagtctgggggaggcgtggtccagcctgggaggtccctgagactctcctgtgcagtctctggattcacctccagtacctatggcatgaactgggtccgccaggctccaggcaaggggctggagtgggtggcagttatatcatatgatggaagtaataaatactacgcagactccgtgaagggccgattcaccatctccagggacaattccaagaacacgctgtatctgcaaatgaacagcctgagacctgaggacacggctgtgtattactgtgcgagaggaaggtacttcgatctctggggccgtggcaccctggtcactgtctcctca

SEQ ID NO: 314 - protein, 115 aa, synthetic construct
  REGION 1..115: note = Description of Artificial Sequence: Synthetic polypeptide
QVQLVESGGGVVQPGRSLRLSCAVSGFTSSTYGMNWVRQAPGKGLEWVAVISYDGSNKYYADSVKGRFTISRDNSKNTLYLQMNSLRPEDTAVYYCARGRYFDLWGRGTLVTVSS

SEQ ID NO: 315 - DNA, 24 bp, synthetic construct
  misc_feature 1..24: note = Description of Artificial Sequence: Synthetic oligonucleotide
  source 1..24: mol_type = other DNA
ggattcacctccagtacctatggc

SEQ ID NO: 316 - protein, 8 aa, synthetic construct
  REGION 1..8: note = Description of Artificial Sequence: Synthetic peptide
GFTSSTYG

SEQ ID NO: 317 - DNA, 24 bp, synthetic construct
  misc_feature 1..24: note = Description of Artificial Sequence: Synthetic oligonucleotide
  source 1..24: mol_type = other DNA
atatcatatgatggaagtaataaa

SEQ ID NO: 318 - protein, 8 aa, synthetic construct
  REGION 1..8: note = Description of Artificial Sequence: Synthetic peptide
ISYDGSNK

SEQ ID NO: 319 - DNA, 24 bp, synthetic construct
  misc_feature 1..24: note = Description of Artificial Sequence: Synthetic oligonucleotide
  source 1..24: mol_type = other DNA
gcgagaggaaggtacttcgatctc

SEQ ID NO: 320 - protein, 8 aa, synthetic construct
  REGION 1..8: note = Description of Artificial Sequence: Synthetic peptide
ARGRYFDL

SEQ ID NO: 321 - DNA, 321 bp, synthetic construct
  misc_feature 1..321: note = Description of Artificial Sequence: Synthetic polynucleotide
  source 1..321: mol_type = other DNA
gacatccagatgacccagtctccttccaccctgtctgcatctgtaggagacagagtcaccatcacttgccgggccagtcaaattattagtagctggttggcctggtatcagcagaaaccagggaaagcccctaaactcctgatctataaggcgtctagtttagcaagtggggtcccatcaaggttcagcggcagtggatctgggacagaattcactctcaccatcagcagcctgcagcctgatgattttgcaacttattactgccaacagtataaaagttattcttacacctttggccaggggaccaacctggagatcaaa

SEQ ID NO: 322 - protein, 107 aa, synthetic construct
  REGION 1..107: note = Description of Artificial Sequence: Synthetic polypeptide
DIQMTQSPSTLSASVGDRVTITCRASQIISSWLAWYQQKPGKAPKLLIYKASSLASGVPSRFSGSGSGTEFTLTISSLQPDDFATYYCQQYKSYSYTFGQGTNLEIK

SEQ ID NO: 323 - DNA, 18 bp, synthetic construct
  misc_feature 1..18: note = Description of Artificial Sequence: Synthetic oligonucleotide
  source 1..18: mol_type = other DNA
caaattattagtagctgg

SEQ ID NO: 324 - protein, 6 aa, synthetic construct
  REGION 1..6: note = Description of Artificial Sequence: Synthetic peptide
QIISSW

SEQ ID NO: 325-326 - skipped (2 entries)

SEQ ID NO: 327 - DNA, 27 bp, synthetic construct
  misc_feature 1..27: note = Description of Artificial Sequence: Synthetic oligonucleotide
  source 1..27: mol_type = other DNA
caacagtataaaagttattcttacacc

SEQ ID NO: 328 - protein, 9 aa, synthetic construct
  REGION 1..9: note = Description of Artificial Sequence: Synthetic peptide
QQYKSYSYT

SEQ ID NO: 329 - DNA, 378 bp, synthetic construct
  misc_feature 1..378: note = Description of Artificial Sequence: Synthetic polynucleotide
  source 1..378: mol_type = other DNA
caggtgcagctggtggagtctgggggaggcgtggtccagcctgggaggtccctgggactctcctgtgcagcgtctggattcaccttcagtagctatggcatgcactgggtccgccaggctccaggcaaggggctggagtgggtggcagttatatggtatgatggaagtaataaatactatgtagactccgtgaagggccgattcaccatctccagagacaattccaagaacacgctgtatctgcaaatgaacagcctgagagccgaggacacggctgtgtattactgtgcgagagaggggctacgatttttggagaattactactactactacggtatggacgtctggggccaagggaccacggtcaccgtctcctca

SEQ ID NO: 330 - protein, 126 aa, synthetic construct
  REGION 1..126: note = Description of Artificial Sequence: Synthetic polypeptide
QVQLVESGGGVVQPGRSLGLSCAASGFTFSSYGMHWVRQAPGKGLEWVAVIWYDGSNKYYVDSVKGRFTISRDNSKNTLYLQMNSLRAEDTAVYYCAREGLRFLENYYYYYGMDVWGQGTTVTVSS

SEQ ID NO: 331 - DNA, 24 bp, synthetic construct
  misc_feature 1..24: note = Description of Artificial Sequence: Synthetic oligonucleotide
  source 1..24: mol_type = other DNA
ggattcaccttcagtagctatggc

SEQ ID NO: 332 - protein, 8 aa, synthetic construct
  REGION 1..8: note = Description of Artificial Sequence: Synthetic peptide
GFTFSSYG

SEQ ID NO: 333 - DNA, 24 bp, synthetic construct
  misc_feature 1..24: note = Description of Artificial Sequence: Synthetic oligonucleotide
  source 1..24: mol_type = other DNA
atatggtatgatggaagtaataaa

SEQ ID NO: 334 - protein, 8 aa, synthetic construct
  REGION 1..8: note = Description of Artificial Sequence: Synthetic peptide
IWYDGSNK

SEQ ID NO: 335 - DNA, 57 bp, synthetic construct
  misc_feature 1..57: note = Description of Artificial Sequence: Synthetic oligonucleotide
  source 1..57: mol_type = other DNA
gcgagagaggggctacgatttttggagaattactactactactacggtatggacgtc

SEQ ID NO: 336 - protein, 19 aa, synthetic construct
  REGION 1..19: note = Description of Artificial Sequence: Synthetic peptide
AREGLRFLENYYYYYGMDV

SEQ ID NO: 337 - DNA, 324 bp, synthetic construct
  misc_feature 1..324: note = Description of Artificial Sequence: Synthetic polynucleotide
  source 1..324: mol_type = other DNA
gaaattgtgttgacgcagtctccaggcaccctgtctttgtctccaggggaaagagccaccctctcctgcagggccagtcagagtattagcagcacctacttagcctggtaccagcagagacctggccaggctcccaggctcctcatctatggtgcatccagcagggccactggcatcccagacaggttcagtggcagtgggtctgggacagacttcactctcaccatcagcagactggagcctgaagattttgcagtgtattactgtcagcagtatggtacctcaccgtacacttttggccaggggaccaagctggagatcaaa

SEQ ID NO: 338 - protein, 108 aa, synthetic construct
  REGION 1..108: note = Description of Artificial Sequence: Synthetic polypeptide
EIVLTQSPGTLSLSPGERATLSCRASQSISSTYLAWYQQRPGQAPRLLIYGASSRATGIPDRFSGSGSGTDFTLTISRLEPEDFAVYYCQQYGTSPYTFGQGTKLEIK

SEQ ID NO: 339 - DNA, 21 bp, synthetic construct
  misc_feature 1..21: note = Description of Artificial Sequence: Synthetic oligonucleotide
  source 1..21: mol_type = other DNA
cagagtattagcagcacctac

SEQ ID NO: 340 - protein, 7 aa, synthetic construct
  REGION 1..7: note = Description of Artificial Sequence: Synthetic peptide
QSISSTY

SEQ ID NO: 341-342 - skipped (2 entries)

SEQ ID NO: 343 - DNA, 27 bp, synthetic construct
  misc_feature 1..27: note = Description of Artificial Sequence: Synthetic oligonucleotide
  source 1..27: mol_type = other DNA
cagcagtatggtacctcaccgtacact

SEQ ID NO: 344 - protein, 9 aa, synthetic construct
  REGION 1..9: note = Description of Artificial Sequence: Synthetic peptide
QQYGTSPYT

SEQ ID NO: 345 - DNA, 345 bp, synthetic construct; identical to SEQ ID NO: 313
  misc_feature 1..345: note = Description of Artificial Sequence: Synthetic polynucleotide
  source 1..345: mol_type = other DNA

SEQ ID NO: 346 - protein, 115 aa, synthetic construct; identical to SEQ ID NO: 314
  REGION 1..115: note = Description of Artificial Sequence: Synthetic polypeptide

SEQ ID NO: 347 - DNA, 24 bp, synthetic construct
  misc_feature 1..24: note = Description of Artificial Sequence: Synthetic oligonucleotide
  source 1..24: mol_type = other DNA
ggattcacctccagtacctatggc

SEQ ID NO: 348 - protein, 8 aa, synthetic construct
  REGION 1..8: note = Description of Artificial Sequence: Synthetic peptide
GFTSSTYG

SEQ ID NO: 349 - DNA, 24 bp, synthetic construct
  misc_feature 1..24: note = Description of Artificial Sequence: Synthetic oligonucleotide
  source 1..24: mol_type = other DNA
atatcatatgatggaagtaataaa

SEQ ID NO: 350 - protein, 8 aa, synthetic construct
  REGION 1..8: note = Description of Artificial Sequence: Synthetic peptide
ISYDGSNK

SEQ ID NO: 351 - DNA, 24 bp, synthetic construct
  misc_feature 1..24: note = Description of Artificial Sequence: Synthetic oligonucleotide
  source 1..24: mol_type = other DNA
gcgagaggaaggtacttcgatctc

SEQ ID NO: 352 - protein, 8 aa, synthetic construct
  REGION 1..8: note = Description of Artificial Sequence: Synthetic peptide
ARGRYFDL

SEQ ID NO: 353 - DNA, 321 bp, synthetic construct
  misc_feature 1..321: note = Description of Artificial Sequence: Synthetic polynucleotide
  source 1..321: mol_type = other DNA
gacatccagatgacccagtctccttccaccctgtctgcatctgtaggagacagagtcaccatcacttgccgggccagtcaaattattagtagctggttggcctggtatcagcagaaaccagggaaagcccctaaactcctgatctataaggcgtctagtttagcaagtggggtcccatcaaggttcagcggcagtggatctgggacagaattcactctcaccatcagcagcctgcagcctgatgattttgcaacttattactgccaacagtataaaagttattcttacacctttggccaggggaccaagctggagatcaaa

SEQ ID NO: 354 - protein, 107 aa, synthetic construct
  REGION 1..107: note = Description of Artificial Sequence: Synthetic polypeptide
DIQMTQSPSTLSASVGDRVTITCRASQIISSWLAWYQQKPGKAPKLLIYKASSLASGVPSRFSGSGSGTEFTLTISSLQPDDFATYYCQQYKSYSYTFGQGTKLEIK

SEQ ID NO: 355 - DNA, 18 bp, synthetic construct
  misc_feature 1..18: note = Description of Artificial Sequence: Synthetic oligonucleotide
  source 1..18: mol_type = other DNA
caaattattagtagctgg

SEQ ID NO: 356 - protein, 6 aa, synthetic construct
  REGION 1..6: note = Description of Artificial Sequence: Synthetic peptide
QIISSW

SEQ ID NO: 357-358 - skipped (2 entries)

SEQ ID NO: 359 - DNA, 27 bp, synthetic construct
  misc_feature 1..27: note = Description of Artificial Sequence: Synthetic oligonucleotide
  source 1..27: mol_type = other DNA
caacagtataaaagttattcttacacc

SEQ ID NO: 360 - protein, 9 aa, synthetic construct
  REGION 1..9: note = Description of Artificial Sequence: Synthetic peptide
QQYKSYSYT

SEQ ID NO: 361 - DNA, 345 bp, synthetic construct
  misc_feature 1..345: note = Description of Artificial Sequence: Synthetic polynucleotide
  source 1..345: mol_type = other DNA
caggtgcagctggtggagtctgggggaggcgtggtccagcctgggaggtccctgagactctcctgtgcagtctctggattcacctccagtacctatggcatgaactgggtccgccaggctccaggcaaggggctggagtgggtggcagttatatcatttgatggaagtaataaatactacgcagactccgtgaagggccgattcaccatctccagggacaattccaagaacacgctgtatctgcaaatgagcagcctgagacctgaggacacggctgtgtattactgtgcgagaggaaggtacttcgatctctggggccgtggcaccctggtcactgtctcctca

SEQ ID NO: 362 - protein, 115 aa, synthetic construct
  REGION 1..115: note = Description of Artificial Sequence: Synthetic polypeptide
QVQLVESGGGVVQPGRSLRLSCAVSGFTSSTYGMNWVRQAPGKGLEWVAVISFDGSNKYYADSVKGRFTISRDNSKNTLYLQMSSLRPEDTAVYYCARGRYFDLWGRGTLVTVSS

SEQ ID NO: 363 - DNA, 24 bp, synthetic construct
  misc_feature 1..24: note = Description of Artificial Sequence: Synthetic oligonucleotide
  source 1..24: mol_type = other DNA
ggattcacctccagtacctatggc

SEQ ID NO: 364 - protein, 8 aa, synthetic construct
  REGION 1..8: note = Description of Artificial Sequence: Synthetic peptide
GFTSSTYG

SEQ ID NO: 365 - DNA, 24 bp, synthetic construct
  misc_feature 1..24: note = Description of Artificial Sequence: Synthetic oligonucleotide
  source 1..24: mol_type = other DNA
atatcatttgatggaagtaataaa

SEQ ID NO: 366 - protein, 8 aa, synthetic construct
  REGION 1..8: note = Description of Artificial Sequence: Synthetic peptide
ISFDGSNK

SEQ ID NO: 367 - DNA, 24 bp, synthetic construct
  misc_feature 1..24: note = Description of Artificial Sequence: Synthetic oligonucleotide
  source 1..24: mol_type = other DNA
gcgagaggaaggtacttcgatctc

SEQ ID NO: 368 - protein, 8 aa, synthetic construct
  REGION 1..8: note = Description of Artificial Sequence: Synthetic peptide
ARGRYFDL

SEQ ID NO: 369 - DNA, 321 bp, synthetic construct
  misc_feature 1..321: note = Description of Artificial Sequence: Synthetic polynucleotide
  source 1..321: mol_type = other DNA
gacacccagatgacccagtctccttccaccctgtctgcatctgtaggagacagagtcaccatcacttgccgggccagtcaaattattagtagctggttggcctggtatcagcagaaaccagggaaagcccctaaactcctgatctataaggcgtctagtttagcaagtggggtcccatcaaggttcagcggcagtggatctgggacagaattcactctcaccatcagcagcctgcagcctgatgattttgcaacttattactgccaacagtataaaagttattcttacacctttggccaggggaccaacctggagatcaaa

SEQ ID NO: 370 - protein, 107 aa, synthetic construct
  REGION 1..107: note = Description of Artificial Sequence: Synthetic polypeptide
DTQMTQSPSTLSASVGDRVTITCRASQIISSWLAWYQQKPGKAPKLLIYKASSLASGVPSRFSGSGSGTEFTLTISSLQPDDFATYYCQQYKSYSYTFGQGTNLEIK

SEQ ID NO: 371 - DNA, 18 bp, synthetic construct
  misc_feature 1..18: note = Description of Artificial Sequence: Synthetic oligonucleotide
  source 1..18: mol_type = other DNA
caaattattagtagctgg

SEQ ID NO: 372 - protein, 6 aa, synthetic construct
  REGION 1..6: note = Description of Artificial Sequence: Synthetic peptide
QIISSW

SEQ ID NO: 373-374 - skipped (2 entries)

SEQ ID NO: 375 - DNA, 27 bp, synthetic construct
  misc_feature 1..27: note = Description of Artificial Sequence: Synthetic oligonucleotide
  source 1..27: mol_type = other DNA
caacagtataaaagttattcttacacc

SEQ ID NO: 376 - protein, 9 aa, synthetic construct
  REGION 1..9: note = Description of Artificial Sequence: Synthetic peptide
QQYKSYSYT

SEQ ID NO: 377 - DNA, 345 bp, synthetic construct; identical to SEQ ID NO: 361
  misc_feature 1..345: note = Description of Artificial Sequence: Synthetic polynucleotide
  source 1..345: mol_type = other DNA

SEQ ID NO: 378 - protein, 115 aa, synthetic construct; identical to SEQ ID NO: 362
  REGION 1..115: note = Description of Artificial Sequence: Synthetic polypeptide

SEQ ID NO: 379 - DNA, 24 bp, synthetic construct
  misc_feature 1..24: note = Description of Artificial Sequence: Synthetic oligonucleotide
  source 1..24: mol_type = other DNA
ggattcacctccagtacctatggc

SEQ ID NO: 380 - protein, 8 aa, synthetic construct
  REGION 1..8: note = Description of Artificial Sequence: Synthetic peptide
GFTSSTYG

SEQ ID NO: 381 - DNA, 24 bp, synthetic construct
  misc_feature 1..24: note = Description of Artificial Sequence: Synthetic oligonucleotide
  source 1..24: mol_type = other DNA
atatcatttgatggaagtaataaa

SEQ ID NO: 382 - protein, 8 aa, synthetic construct
  REGION 1..8: note = Description of Artificial Sequence: Synthetic peptide
ISFDGSNK

SEQ ID NO: 383 - DNA, 24 bp, synthetic construct
  misc_feature 1..24: note = Description of Artificial Sequence: Synthetic oligonucleotide
  source 1..24: mol_type = other DNA
gcgagaggaaggtacttcgatctc

SEQ ID NO: 384 - protein, 8 aa, synthetic construct
  REGION 1..8: note = Description of Artificial Sequence: Synthetic peptide
ARGRYFDL

SEQ ID NO: 385 - DNA, 321 bp, synthetic construct; identical to SEQ ID NO: 369
  misc_feature 1..321: note = Description of Artificial Sequence: Synthetic polynucleotide
  source 1..321: mol_type = other DNA

SEQ ID NO: 386 - protein, 107 aa, synthetic construct; identical to SEQ ID NO: 370
  REGION 1..107: note = Description of Artificial Sequence: Synthetic polypeptide

SEQ ID NO: 387 - DNA, 18 bp, synthetic construct
  misc_feature 1..18: note = Description of Artificial Sequence: Synthetic oligonucleotide
  source 1..18: mol_type = other DNA
caaattattagtagctgg

SEQ ID NO: 388 - protein, 6 aa, synthetic construct
  REGION 1..6: note = Description of Artificial Sequence: Synthetic peptide
QIISSW

SEQ ID NO: 389-390 - skipped (2 entries)

SEQ ID NO: 391 - DNA, 27 bp, synthetic construct
  misc_feature 1..27: note = Description of Artificial Sequence: Synthetic oligonucleotide
  source 1..27: mol_type = other DNA
caacagtataaaagttattcttacacc

SEQ ID NO: 392 - protein, 9 aa, synthetic construct
  REGION 1..9: note = Description of Artificial Sequence: Synthetic peptide
QQYKSYSYT

SEQ ID NO: 393-400 - skipped (8 entries)

SEQ ID NO: 401 - DNA, 369 bp, synthetic construct
  misc_feature 1..369: note = Description of Artificial Sequence: Synthetic polynucleotide
  source 1..369: mol_type = other DNA
gaagtgcaactggtggagtctgggggaggcttagtacagcctggcgggtccctgagactctcctgtgcagccactggattcacctttgatgattttaccatgcactgggtccggcaagctccagggaagggcctggagtgggtctcaggtatcagttggaatagtggtagcataggctatgtggactctgtgaagggccgattcaccatctccagagacaacgccaagaactccctgtatctgcaaatgaacagtctgagagctgaggacacggccttgtactactgtgcaaaagataatagtggctacggctattattactacggtatggacgtctggggccaagggaccacggtcaccgtctcctca

SEQ ID NO: 402 - protein, 123 aa, synthetic construct
  REGION 1..123: note = Description of Artificial Sequence: Synthetic polypeptide
EVQLVESGGGLVQPGGSLRLSCAATGFTFDDFTMHWVRQAPGKGLEWVSGISWNSGSIGYVDSVKGRFTISRDNAKNSLYLQMNSLRAEDTALYYCAKDNSGYGYYYYGMDVWGQGTTVTVSS

SEQ ID NO: 403 - DNA, 24 bp, synthetic construct
  misc_feature 1..24: note = Description of Artificial Sequence: Synthetic oligonucleotide
  source 1..24: mol_type = other DNA
ggattcacctttgatgattttacc

SEQ ID NO: 404 - protein, 8 aa, synthetic construct
  REGION 1..8: note = Description of Artificial Sequence: Synthetic peptide
GFTFDDFT

SEQ ID NO: 405 - DNA, 24 bp, synthetic construct
  misc_feature 1..24: note = Description of Artificial Sequence: Synthetic oligonucleotide
  source 1..24: mol_type = other DNA
atcagttggaatagtggtagcata

SEQ ID NO: 406 - protein, 8 aa, synthetic construct
  REGION 1..8: note = Description of Artificial Sequence: Synthetic peptide
ISWNSGSI

SEQ ID NO: 407 - DNA, 48 bp, synthetic construct
  misc_feature 1..48: note = Description of Artificial Sequence: Synthetic oligonucleotide
  source 1..48: mol_type = other DNA
gcaaaagataatagtggctacggctattattactacggtatggacgtc

SEQ ID NO: 408 - protein, 16 aa, synthetic construct
  REGION 1..16: note = Description of Artificial Sequence: Synthetic peptide
AKDNSGYGYYYYGMDV

SEQ ID NO: 409 - DNA, 321 bp, synthetic construct
  misc_feature 1..321: note = Description of Artificial Sequence: Synthetic polynucleotide
  source 1..321: mol_type = other DNA
gaaatagtgatgacgcagtctccagccaccctgtctgtgtctccaggggaaagagccaccctctcctgcagggccagtcacagtgttagcaggaactcagcctggtaccagcagaaacctggccaggctcccaggctcctcatctatggtgcatccaccagggccactggtatcccagccaggttcagtggcagtgggtctgggacagaattcactctcaccatcagcagcctgcagtctgaagattttgcaatttattactgtcagcagtataataattggcctctcactttcggcggagggaccaaggtggagatcaaa

SEQ ID NO: 410 - protein, 107 aa, synthetic construct
  REGION 1..107: note = Description of Artificial Sequence: Synthetic polypeptide
EIVMTQSPATLSVSPGERATLSCRASHSVSRNSAWYQQKPGQAPRLLIYGASTRATGIPARFSGSGSGTEFTLTISSLQSEDFAIYYCQQYNNWPLTFGGGTKVEIK

SEQ ID NO: 411 - DNA, 18 bp, synthetic construct
  misc_feature 1..18: note = Description of Artificial Sequence: Synthetic oligonucleotide
  source 1..18: mol_type = other DNA
cacagtgttagcaggaac

SEQ ID NO: 412 - protein, 6 aa, synthetic construct
  REGION 1..6: note = Description of Artificial Sequence: Synthetic peptide
HSVSRN

SEQ ID NO: 413-414 - skipped (2 entries)

SEQ ID NO: 415 - DNA, 27 bp, synthetic construct
  misc_feature 1..27: note = Description of Artificial Sequence: Synthetic oligonucleotide
  source 1..27: mol_type = other DNA
cagcagtataataattggcctctcact

SEQ ID NO: 416 - protein, 9 aa, synthetic construct
  REGION 1..9: note = Description of Artificial Sequence: Synthetic peptide
QQYNNWPLT

SEQ ID NO: 417 - DNA, 372 bp, synthetic construct
  misc_feature 1..372: note = Description of Artificial Sequence: Synthetic polynucleotide
  source 1..372: mol_type = other DNA
gaagtgcaactggtggaatcggggggaggcttggtacagcctggcgggtccctgagactctcctgtgcagcctctggattctcctttgatgattataccatgcactgggtccggcaacctccagggaagggcctggagtgggtctcaggtattagttggaatagtggtagcataggctatgcggactctgtgaagggccgattcaccatctccagagacaacgccaagaactccctgtatctgcaaatgaacagtctgagagctggggacacggccttgtactactgtgcaaaagataatagtggctacggctattactactactacggtatggacgtctggggccaagggaccacggtcaccgtctcctca

SEQ ID NO: 418 - protein, 124 aa, synthetic construct
  REGION 1..124: note = Description of Artificial Sequence: Synthetic polypeptide
EVQLVESGGGLVQPGGSLRLSCAASGFSFDDYTMHWVRQPPGKGLEWVSGISWNSGSIGYADSVKGRFTISRDNAKNSLYLQMNSLRAGDTALYYCAKDNSGYGYYYYYGMDVWGQGTTVTVSS

SEQ ID NO: 419 - DNA, 24 bp, synthetic construct
  misc_feature 1..24: note = Description of Artificial Sequence: Synthetic oligonucleotide
  source 1..24: mol_type = other DNA
ggattctcctttgatgattatacc

SEQ ID NO: 420 - protein, 8 aa, synthetic construct
  REGION 1..8: note = Description of Artificial Sequence: Synthetic peptide
GFSFDDYT

SEQ ID NO: 421 - DNA, 24 bp, synthetic construct
  misc_feature 1..24: note = Description of Artificial Sequence: Synthetic oligonucleotide
  source 1..24: mol_type = other DNA
attagttggaatagtggtagcata

SEQ ID NO: 422 - protein, 8 aa, synthetic construct
  REGION 1..8: note = Description of Artificial Sequence: Synthetic peptide
ISWNSGSI

SEQ ID NO: 423 - DNA, 51 bp, synthetic construct
  misc_feature 1..51: note = Description of Artificial Sequence: Synthetic oligonucleotide
  source 1..51: mol_type = other DNA
gcaaaagataatagtggctacggctattactactactacggtatggacgtc

SEQ ID NO: 424 - protein, 17 aa, synthetic construct
  REGION 1..17: note = Description of Artificial Sequence: Synthetic peptide
AKDNSGYGYYYYYGMDV

SEQ ID NO: 425 - DNA, 321 bp, synthetic construct
  misc_feature 1..321: note = Description of Artificial Sequence: Synthetic polynucleotide
  source 1..321: mol_type = other DNA
gaaatagtgatgacgcagtctccagccaccctgtctgtgtctccaggggaaagagccaccctctcctgcagggccagtcagagtgttagcagcaacttagcctggtaccagcagaaacctggccaggctcccagactcctcatctatggtgcatccaccagggccactggtatcccagccaggttcagtggcagtgggtctgggacagaattcactctcaccatcagcagcctgcagtctgaagattttgcagtttattactgtcagcagtattataactggcctctcactttcggcggagggaccaaggtggagatcaaa

SEQ ID NO: 426 - protein, 107 aa, synthetic construct
  REGION 1..107: note = Description of Artificial Sequence: Synthetic polypeptide
EIVMTQSPATLSVSPGERATLSCRASQSVSSNLAWYQQKPGQAPRLLIYGASTRATGIPARFSGSGSGTEFTLTISSLQSEDFAVYYCQQYYNWPLTFGGGTKVEIK

SEQ ID NO: 427 - DNA, 18 bp, synthetic construct
  misc_feature 1..18: note = Description of Artificial Sequence: Synthetic oligonucleotide
  source 1..18: mol_type = other DNA
cagagtgttagcagcaac

SEQ ID NO: 428 - protein, 6 aa, synthetic construct
  REGION 1..6: note = Description of Artificial Sequence: Synthetic peptide
QSVSSN

SEQ ID NO: 429-430 - skipped (2 entries)

SEQ ID NO: 431 - DNA, 27 bp, synthetic construct
  misc_feature 1..27: note = Description of Artificial Sequence: Synthetic oligonucleotide
  source 1..27: mol_type = other DNA
cagcagtattataactggcctctcact

SEQ ID NO: 432 - protein, 9 aa, synthetic construct
  REGION 1..9: note = Description of Artificial Sequence: Synthetic peptide
QQYYNWPLT

SEQ ID NO: 433 - DNA, 372 bp, synthetic construct
  misc_feature 1..372: note = Description of Artificial Sequence: Synthetic polynucleotide
  source 1..372: mol_type = other DNA
gaagtacagctggtggagtctgggggaggcttggtacagcctggcaggtccctgagactctcctgtgtagcctctggattcccctttgctgattataccatgcactgggtccggcaagctccagggaagggcctggagtgggtctcagatattagttggaatagtggtagcaaaggctatgcggactctgtgaagggccgattcaccatctccagagacaatgccaagaactccctgtatctgcaaatgaacagtctgagaactgaggacacggccttctattactgtgcaaaagatatgagtggctacgcccactacttctactacggtatggacgtctggggccaagggaccacggtcaccgtctcctca

SEQ ID NO: 434 - protein, 124 aa, synthetic construct
  REGION 1..124: note = Description of Artificial Sequence: Synthetic polypeptide
EVQLVESGGGLVQPGRSLRLSCVASGFPFADYTMHWVRQAPGKGLEWVSDISWNSGSKGYADSVKGRFTISRDNAKNSLYLQMNSLRTEDTAFYYCAKDMSGYAHYFYYGMDVWGQGTTVTVSS

SEQ ID NO: 435 - DNA, 24 bp, synthetic construct
  misc_feature 1..24: note = Description of Artificial Sequence: Synthetic oligonucleotide
  source 1..24: mol_type = other DNA
ggattcccctttgctgattatacc

SEQ ID NO: 436 - protein, 8 aa, synthetic construct
  REGION 1..8: note = Description of Artificial Sequence: Synthetic peptide
GFPFADYT

SEQ ID NO: 437 - DNA, 24 bp, synthetic construct
  misc_feature 1..24: note = Description of Artificial Sequence: Synthetic oligonucleotide
  source 1..24: mol_type = other DNA
attagttggaatagtggtagcaaa

SEQ ID NO: 438 - protein, 8 aa, synthetic construct
  REGION 1..8: note = Description of Artificial Sequence: Synthetic peptide
ISWNSGSK

SEQ ID NO: 439 - DNA, 51 bp, synthetic construct
  misc_feature 1..51: note = Description of Artificial Sequence: Synthetic oligonucleotide
  source 1..51: mol_type = other DNA
gcaaaagatatgagtggctacgcccactacttctactacggtatggacgtc

SEQ ID NO: 440 - protein, 17 aa, synthetic construct
  REGION 1..17: note = Description of Artificial Sequence: Synthetic peptide
AKDMSGYAHYFYYGMDV

SEQ ID NO: 441 - DNA, 324 bp, synthetic construct
  misc_feature 1..324: note = Description of Artificial Sequence: Synthetic polynucleotide
  source 1..324: mol_type = other DNA
gacatccagatgacccagtctccatcctccctgtctgcatctgtaggagacagagtcaccatcacttgccggccaagtcagagcattagcagctatttaaattggtttcagcagaaaccagggaaagcccctaagctcctgatctatgctgcatccagtttgcaaagtggggtcccatcaaggttcagtggcagtggatctgggacagatttcactctcaccatcagcagtctgcaacctgaagattttgcaacttactactgtcaacagagttacagtacccctccgatcaccttcggccaagggacacgactggagattaaa

SEQ ID NO: 442 - protein, 108 aa, synthetic construct
  REGION 1..108: note = Description of Artificial Sequence: Synthetic polypeptide
DIQMTQSPSSLSASVGDRVTITCRPSQSISSYLNWFQQKPGKAPKLLIYAASSLQSGVPSRFSGSGSGTDFTLTISSLQPEDFATYYCQQSYSTPPITFGQGTRLEIK

SEQ ID NO: 443 - DNA, 18 bp, synthetic construct
  misc_feature 1..18: note = Description of Artificial Sequence: Synthetic oligonucleotide
  source 1..18: mol_type = other DNA
cagagcattagcagctat

SEQ ID NO: 444 - protein, 6 aa, synthetic construct
  REGION 1..6: note = Description of Artificial Sequence: Synthetic peptide
QSISSY

SEQ ID NO: 445-446 - skipped (2 entries)

SEQ ID NO: 447 - DNA, 30 bp, synthetic construct; identical to SEQ ID NO: 15
  misc_feature 1..30: note = Description of Artificial Sequence: Synthetic oligonucleotide
  source 1..30: mol_type = other DNA

SEQ ID NO: 448 - protein, 10 aa, synthetic construct
  REGION 1..10: note = Description of Artificial Sequence: Synthetic peptide
QQSYSTPPIT

SEQ ID NO: 449 - DNA, 372 bp, synthetic construct
  misc_feature 1..372: note = Description of Artificial Sequence: Synthetic polynucleotide
  source 1..372: mol_type = other DNA
gaagtacaactggtggagtctgggggaggcttggtacagcctggcaggtccctaagactctcctgtgcagcctctggattcacctttgatgattataccatgcactgggtccggcaagttccagggaagggcctggagtgggtctcaggtattagttggaatagtggcagcttggcctacgcggactctgtgaagggccgattcaccatctccagagacaacgccaagaattccctgtatctgcaaatgaacagtcttcaccctgaggacacggccctctattactgtgtaaaagatggtagtggctacggccactactcctactacggtttggacgtctggggccaggggaccacggtcaccgtctcctca

SEQ ID NO: 450 - protein, 124 aa, synthetic construct
  REGION 1..124: note = Description of Artificial Sequence: Synthetic polypeptide
EVQLVESGGGLVQPGRSLRLSCAASGFTFDDYTMHWVRQVPGKGLEWVSGISWNSGSLAYADSVKGRFTISRDNAKNSLYLQMNSLHPEDTALYYCVKDGSGYGHYSYYGLDVWGQGTTVTVSS

SEQ ID NO: 451 - DNA, 24 bp, synthetic construct
  misc_feature 1..24: note = Description of Artificial Sequence: Synthetic oligonucleotide
  source 1..24: mol_type = other DNA
ggattcacctttgatgattatacc

SEQ ID NO: 452 - protein, 8 aa, synthetic construct
  REGION 1..8: note = Description of Artificial Sequence: Synthetic peptide
GFTFDDYT

SEQ ID NO: 453 - DNA, 24 bp, synthetic construct
  misc_feature 1..24: note = Description of Artificial Sequence: Synthetic oligonucleotide
  source 1..24: mol_type = other DNA
attagttggaatagtggcagcttg

SEQ ID NO: 454 - protein, 8 aa, synthetic construct
  REGION 1..8: note = Description of Artificial Sequence: Synthetic peptide
ISWNSGSL

SEQ ID NO: 455 - DNA, 51 bp, synthetic construct
  misc_feature 1..51: note = Description of Artificial Sequence: Synthetic oligonucleotide
  source 1..51: mol_type = other DNA
gtaaaagatggtagtggctacggccactactcctactacggtttggacgtc

SEQ ID NO: 456 - protein, 17 aa, synthetic construct
  REGION 1..17: note = Description of Artificial Sequence: Synthetic peptide
VKDGSGYGHYSYYGLDV

SEQ ID NO: 457 - DNA, 324 bp, synthetic construct
  misc_feature 1..324: note = Description of Artificial Sequence: Synthetic polynucleotide
  source 1..324: mol_type = other DNA
gaaattgtgttgacgcagtctccaggcaccctgtctttgtctccaggggaaagagccaccctctcctgcagggccagtcagagtgttagcagcagctacttagcctggtaccagcagaaacctggccaggctcccaggctcctcatctatggtgcatccagcagggccactggcatcccagacaggttcagtggcagtgggtctgggacagacttcactctcaccatcagcagactggagcctgaagattttgcagtgtattactgtcagcagtatggtagttcaccttggacgttcggccaagggaccaaggtggaaatcaaa

SEQ ID NO: 458 - protein, 108 aa, synthetic construct; identical to SEQ ID NO: 114
  REGION 1..108: note = Description of Artificial Sequence: Synthetic polypeptide

SEQ ID NO: 459 - DNA, 21 bp, synthetic construct
  misc_feature 1..21: note = Description of Artificial Sequence: Synthetic oligonucleotide
  source 1..21: mol_type = other DNA
cagagtgttagcagcagctac

SEQ ID NO: 460 - protein, 7 aa, synthetic construct
  REGION 1..7: note = Description of Artificial Sequence: Synthetic peptide
QSVSSSY

SEQ ID NO: 461-462 - skipped (2 entries)

SEQ ID NO: 463 - DNA, 27 bp, synthetic construct
  misc_feature 1..27: note = Description of Artificial Sequence: Synthetic oligonucleotide
  source 1..27: mol_type = other DNA
cagcagtatggtagttcaccttggacg

SEQ ID NO: 464 - protein, 9 aa, synthetic construct
  REGION 1..9: note = Description of Artificial Sequence: Synthetic peptide
QQYGSSPWT

SEQ ID NO: 465 - DNA, 372 bp, synthetic construct
  misc_feature 1..372: note = Description of Artificial Sequence: Synthetic polynucleotide
  source 1..372: mol_type = other DNA
gaagtacagctggtggagtctgggggaggcttggtacagcctggcaggtccctgagactctcctgtgtagcctctggattcccctttgctgattataccatgcactgggtccggcaagctccagggaagggcctggagtgggtctcagatattagttggaatagtggtagcataggctatgcggactctgtgaagggccgattcaccatctccagagacaatgccaagaactccctgtatctgcaaatgaacagtctgagaactgaggacacggccttgtattactgtgcaaaagatatgagtggctacgcccactacttctactacggtatggacgtctggggccaagggaccacggtcaccgtctcctca

SEQ ID NO: 466 - protein, 124 aa, synthetic construct
  REGION 1..124: note = Description of Artificial Sequence: Synthetic polypeptide
EVQLVESGGGLVQPGRSLRLSCVASGFPFADYTMHWVRQAPGKGLEWVSDISWNSGSIGYADSVKGRFTISRDNAKNSLYLQMNSLRTEDTALYYCAKDMSGYAHYFYYGMDVWGQGTTVTVSS

SEQ ID NO: 467 - DNA, 24 bp, synthetic construct
  misc_feature 1..24: note = Description of Artificial Sequence: Synthetic oligonucleotide
  source 1..24: mol_type = other DNA
ggattcccctttgctgattatacc

SEQ ID NO: 468 - protein, 8 aa, synthetic construct
  REGION 1..8: note = Description of Artificial Sequence: Synthetic peptide
GFPFADYT

SEQ ID NO: 469 - DNA, 24 bp, synthetic construct
  misc_feature 1..24: note = Description of Artificial Sequence: Synthetic oligonucleotide
  source 1..24: mol_type = other DNA
attagttggaatagtggtagcata

SEQ ID NO: 470 - protein, 8 aa, synthetic construct
  REGION 1..8: note = Description of Artificial Sequence: Synthetic peptide
ISWNSGSI

SEQ ID NO: 471 - DNA, 51 bp, synthetic construct; identical to SEQ ID NO: 439
  misc_feature 1..51: note = Description of Artificial Sequence: Synthetic oligonucleotide
  source 1..51: mol_type = other DNA

SEQ ID NO: 472 - protein, 17 aa, synthetic construct
  REGION 1..17: note = Description of Artificial Sequence: Synthetic peptide
AKDMSGYAHYFYYGMDV

SEQ ID NO: 473 - DNA, 324 bp, synthetic construct
  misc_feature 1..324: note = Description of Artificial Sequence: Synthetic polynucleotide
  source 1..324: mol_type = other DNA
gacatccagatgacccagtctccatcctccctgtctgcatctgtaggagacagagtcaccatcacttgccgggcaagtcagagcattagcagctatttaaattggtatcagcagaaaccagggaaagcccctaagctcctgatctttgctgcatccagtttgcaaagtggggtcccatcaaggttcagtggcagtggatctgggacagatttcactctcaccatcagcagtctgcaacctgaagattttgcaacttactactgtcaacagagttacagtacccctccgatcaccttcggccaagggacacgactggagattaaa

SEQ ID NO: 474 - protein, 108 aa, synthetic construct
  REGION 1..108: note = Description of Artificial Sequence: Synthetic polypeptide
DIQMTQSPSSLSASVGDRVTITCRASQSISSYLNWYQQKPGKAPKLLIFAASSLQSGVPSRFSGSGSGTDFTLTISSLQPEDFATYYCQQSYSTPPITFGQGTRLEIK

SEQ ID NO: 475 - DNA, 18 bp, synthetic construct
  misc_feature 1..18: note = Description of Artificial Sequence: Synthetic oligonucleotide
  source 1..18: mol_type = other DNA
cagagcattagcagctat

SEQ ID NO: 476 - protein, 6 aa, synthetic construct
  REGION 1..6: note = Description of Artificial Sequence: Synthetic peptide
QSISSY

SEQ ID NO: 477-478 - skipped (2 entries)

SEQ ID NO: 479 - DNA, 30 bp, synthetic construct; identical to SEQ ID NO: 15
  misc_feature 1..30: note = Description of Artificial Sequence: Synthetic oligonucleotide
  source 1..30: mol_type = other DNA

SEQ ID NO: 480 - protein, 10 aa, synthetic construct
  REGION 1..10: note = Description of Artificial Sequence: Synthetic peptide
QQSYSTPPIT

SEQ ID NO: 481 - DNA, 372 bp, synthetic construct
  misc_feature 1..372: note = Description of Artificial Sequence: Synthetic polynucleotide
  source 1..372: mol_type = other DNA
gaagtgcagctggtggagtctgggggaggcttggtacagcctggcaggtccctgaaactctcctgtacagcctctggattcacctttgctgattataccatgcactgggtccgacaaggtccagggaagggcctggagtgggtctcagatattagttggaatagtggtagtaaaggctatgcggactctgtgaagggccgattcaccatctccagagacaacgccaagaactccctgtatctgcaaatgaacagtctgagaactgaggacacggccttgtattactgtgcaaaagatatgagtggctacgcccactactactactacgctttggacgtctggggccaagggaccacggtcaccgtctcctca

SEQ ID NO: 482 - protein, 124 aa, synthetic construct
  REGION 1..124: note = Description of Artificial Sequence: Synthetic polypeptide
EVQLVESGGGLVQPGRSLKLSCTASGFTFADYTMHWVRQGPGKGLEWVSDISWNSGSKGYADSVKGRFTISRDNAKNSLYLQMNSLRTEDTALYYCAKDMSGYAHYYYYALDVWGQGTTVTVSS

SEQ ID NO: 483 - DNA, 24 bp, synthetic construct
  misc_feature 1..24: note = Description of Artificial Sequence: Synthetic oligonucleotide
  source 1..24: mol_type = other DNA
ggattcacctttgctgattatacc

SEQ ID NO: 484 - protein, 8 aa, synthetic construct
  REGION 1..8: note = Description of Artificial Sequence: Synthetic peptide
GFTFADYT

SEQ ID NO: 485 - DNA, 24 bp, synthetic construct
  misc_feature 1..24: note = Description of Artificial Sequence: Synthetic oligonucleotide
  source 1..24: mol_type = other DNA
attagttggaatagtggtagtaaa

SEQ ID NO: 486 - protein, 8 aa, synthetic construct
  REGION 1..8: note = Description of Artificial Sequence: Synthetic peptide
ISWNSGSK

SEQ ID NO: 487 - DNA, 51 bp, synthetic construct
  misc_feature 1..51: note = Description of Artificial Sequence: Synthetic oligonucleotide
  source 1..51: mol_type = other DNA
gcaaaagatatgagtggctacgcccactactactactacgctttggacgtc

SEQ ID NO: 488 - protein, 17 aa, synthetic construct
  REGION 1..17: note = Description of Artificial Sequence: Synthetic peptide
AKDMSGYAHYYYYALDV

SEQ ID NO: 489 - DNA, 324 bp, synthetic construct
  misc_feature 1..324: note = Description of Artificial Sequence: Synthetic polynucleotide
  source 1..324: mol_type = other DNA
gacatccagatgacccagtctccatcctccctgtctgcatctgtaggagacagagtcaccatcacttgccgggcaagtcagagcattagcaactatttaaattggtatcagcagaaaccagggaaagcccctaagctcctgatctatgctgcatccagtttgcaaagtggggtcccatcaaggttcagtggcagtggatctgggacagatttcactctcaccatcagcagtctgcaacctgaagattttgcaacttactactgtcaacagagttacagtaaccccccgatcaccttcggccaagggacacgactggagattaaa

SEQ ID NO: 490 - protein, 108 aa, synthetic construct
  REGION 1..108: note = Description of Artificial Sequence: Synthetic polypeptide
DIQMTQSPSSLSASVGDRVTITCRASQSISNYLNWYQQKPGKAPKLLIYAASSLQSGVPSRFSGSGSGTDFTLTISSLQPEDFATYYCQQSYSNPPITFGQGTRLEIK

SEQ ID NO: 491 - DNA, 18 bp, synthetic construct
  misc_feature 1..18: note = Description of Artificial Sequence: Synthetic oligonucleotide
  source 1..18: mol_type = other DNA
cagagcattagcaactat

SEQ ID NO: 492 - protein, 6 aa, synthetic construct
  REGION 1..6: note = Description of Artificial Sequence: Synthetic peptide
QSISNY

SEQ ID NO: 493-494 - skipped (2 entries)

SEQ ID NO: 495 - DNA, 30 bp, synthetic construct
  misc_feature 1..30: note = Description of Artificial Sequence: Synthetic oligonucleotide
  source 1..30: mol_type = other DNA
caacagagttacagtaaccccccgatcacc

SEQ ID NO: 496 - protein, 10 aa, synthetic construct
  REGION 1..10: note = Description of Artificial Sequence: Synthetic peptide
QQSYSNPPIT

SEQ ID NO: 497 - DNA, 363 bp, synthetic construct
  misc_feature 1..363: note = Description of Artificial Sequence: Synthetic polynucleotide
  source 1..363: mol_type = other DNA
caggtgcagctggtggagtctgggggaggcgtggtccagcctgggaggtccctgagactctcctgtgcagcctctggattcaccttcagtagaaaaggcatgcactgggtccgccaggctccagtcaaggggctggagtgggtggcagttatatcatatgatggaagtaataaatactatgcagactccgtgaagggccgattcaccatctccagagacaattccaagaacacgctgtatctgcaaatgaacagcctgacagctgaggacacggctgtgtattactgtgcgaaagaaggggggcatgactatggtggtacctttgactactggggccagggaaccctggtcaccgtctcctca

SEQ ID NO: 498 - protein, 121 aa, synthetic construct
  REGION 1..121: note = Description of Artificial Sequence: Synthetic polypeptide
QVQLVESGGGVVQPGRSLRLSCAASGFTFSRKGMHWVRQAPVKGLEWVAVISYDGSNKYYADSVKGRFTISRDNSKNTLYLQMNSLTAEDTAVYYCAKEGGHDYGGTFDYWGQGTLVTVSS

SEQ ID NO: 499 - DNA, 24 bp, synthetic construct
  misc_feature 1..24: note = Description of Artificial Sequence: Synthetic oligonucleotide
  source 1..24: mol_type = other DNA
ggattcaccttcagtagaaaaggc

SEQ ID NO: 500 - protein, 8 aa, synthetic construct
  REGION 1..8: note = Description of Artificial Sequence: Synthetic peptide
GFTFSRKG

SEQ ID NO: 501 - DNA, 24 bp, synthetic construct
  misc_feature 1..24: note = Description of Artificial Sequence: Synthetic oligonucleotide
  source 1..24: mol_type = other DNA
atatcatatgatggaagtaataaa

SEQ ID NO: 502 - protein, 8 aa, synthetic construct
  REGION 1..8: note = Description of Artificial Sequence: Synthetic peptide
ISYDGSNK

SEQ ID NO: 503 - DNA, 42 bp, synthetic construct
  misc_feature 1..42: note = Description of Artificial Sequence: Synthetic oligonucleotide
  source 1..42: mol_type = other DNA
gcgaaagaaggggggcatgactatggtggtacctttgactac

SEQ ID NO: 504 - protein, 14 aa, synthetic construct
  REGION 1..14: note = Description of Artificial Sequence: Synthetic peptide
AKEGGHDYGGTFDY

SEQ ID NO: 505 - DNA, 321 bp, synthetic construct
  misc_feature 1..321: note = Description of Artificial Sequence: Synthetic polynucleotide
  source 1..321: mol_type = other DNA
gacatccagatgacccagtctccatcctccctgtctgcatctgtaggagacagagtcaccatcacttgccaggcgagtcaggacattaacaactatttaaattggtatcagcagaaaccagggaaagcccctaagttcctgatctacgatgcatccaatttggaaacaggggtcccatcaaggttcagtggaagtggatctgggacagattttactttcaccatcagcagcctgcagcctgaagatattgcaacatattactgtcaacagtatgatgatctcccattcactttcggccctgggaccaaagtggatatcaaa

SEQ ID NO: 506 - protein, 107 aa, synthetic construct
  REGION 1..107: note = Description of Artificial Sequence: Synthetic polypeptide
DIQMTQSPSSLSASVGDRVTITCQASQDINNYLNWYQQKPGKAPKFLIYDASNLETGVPSRFSGSGSGTDFTFTISSLQPEDIATYYCQQYDDLPFTFGPGTKVDIK

SEQ ID NO: 507 - DNA, 18 bp, synthetic construct
  misc_feature 1..18: note = Description of Artificial Sequence: Synthetic oligonucleotide
  source 1..18: mol_type = other DNA
caggacattaacaactat

SEQ ID NO: 508 - protein, 6 aa, synthetic construct
  REGION 1..6: note = Description of Artificial Sequence: Synthetic peptide
QDINNY

SEQ ID NO: 509-510 - skipped (2 entries)

SEQ ID NO: 511 - DNA, 27 bp, synthetic construct
  misc_feature 1..27: note = Description of Artificial Sequence: Synthetic oligonucleotide
  source 1..27: mol_type = other DNA
caacagtatgatgatctcccattcact

SEQ ID NO: 512 - protein, 9 aa, synthetic construct
  REGION 1..9: note = Description of Artificial Sequence: Synthetic peptide
QQYDDLPFT

SEQ ID NO: 513 - DNA, 369 bp, synthetic construct
  misc_feature 1..369: note = Description of Artificial Sequence: Synthetic polynucleotide
  source 1..369: mol_type = other DNA
gaagtgcagctggtggagtctgggggaggcttggtacagcctggcaggtccctgagactctcctgtgcagcctctggattcacctttgatgattataccatgcactgggtccggcaagctccagggaagggcctggagtgggtctcaggtattagttggaatagtggtagtataggctatgcggactctgtgaagggccgattcaccatctccagagacaacgccaagaagtccctgtatctgcaaatgaacagtctgagagctgaggacacggccttgtattactgtgcaaaagataatagtggctacggtcactactactacggaatggacgtctggggccaagggaccacggtcaccgtcgcctca

SEQ ID NO: 514 - protein, 123 aa, synthetic construct
  REGION 1..123: note = Description of Artificial Sequence: Synthetic polypeptide
EVQLVESGGGLVQPGRSLRLSCAASGFTFDDYTMHWVRQAPGKGLEWVSGISWNSGSIGYADSVKGRFTISRDNAKKSLYLQMNSLRAEDTALYYCAKDNSGYGHYYYGMDVWGQGTTVTVAS

SEQ ID NO: 515 - DNA, 24 bp, synthetic construct
  misc_feature 1..24: note = Description of Artificial Sequence: Synthetic oligonucleotide
  source 1..24: mol_type = other DNA
ggattcacctttgatgattatacc

SEQ ID NO: 516 - protein, 8 aa, synthetic construct
  REGION 1..8: note = Description of Artificial Sequence: Synthetic peptide
GFTFDDYT

SEQ ID NO: 517 - DNA, 24 bp, synthetic construct
  misc_feature 1..24: note = Description of Artificial Sequence: Synthetic oligonucleotide
  source 1..24: mol_type = other DNA
attagttggaatagtggtagtata

SEQ ID NO: 518 - protein, 8 aa, synthetic construct
  REGION 1..8: note = Description of Artificial Sequence: Synthetic peptide
ISWNSGSI

SEQ ID NO: 519 - DNA, 48 bp, synthetic construct
  misc_feature 1..48: note = Description of Artificial Sequence: Synthetic oligonucleotide
  source 1..48: mol_type = other DNA
gcaaaagataatagtggctacggtcactactactacggaatggacgtc

SEQ ID NO: 520 - protein, 16 aa, synthetic construct
  REGION 1..16: note = Description of Artificial Sequence: Synthetic peptide
AKDNSGYGHYYYGMDV

SEQ ID NO: 521 - DNA, 321 bp, synthetic construct
  misc_feature 1..321: note = Description of Artificial Sequence: Synthetic polynucleotide
  source 1..321: mol_type = other DNA
gaaatagtgatgacgcagtctccagccaccctgtctgtgtctccaggggaaagagccaccctctcctgcagggccagtcagagtgttagcagcaacttagcctggtaccagcaaaaacctggccaggctcccaggctcctcatctatggtgcatccaccagggccactggtatcccagccaggttcagtggcagtgggtctgggacagagttcactctcaccatcagcagcctgcagtctgaagattttgcagtttattactgtcagcactatattaactggcctctcactttcggcggagggaccaaggtggagatcaaa

SEQ ID NO: 522 - protein, 107 aa, synthetic construct
  REGION 1..107: note = Description of Artificial Sequence: Synthetic polypeptide
EIVMTQSPATLSVSPGERATLSCRASQSVSSNLAWYQQKPGQAPRLLIYGASTRATGIPARFSGSGSGTEFTLTISSLQSEDFAVYYCQHYINWPLTFGGGTKVEIK

SEQ ID NO: 523 - DNA, 18 bp, synthetic construct
  misc_feature 1..18: note = Description of Artificial Sequence: Synthetic oligonucleotide
  source 1..18: mol_type = other DNA
cagagtgttagcagcaac

SEQ ID NO: 524 - protein, 6 aa, synthetic construct
  REGION 1..6: note = Description of Artificial Sequence: Synthetic peptide
QSVSSN

SEQ ID NO: 525-526 - skipped (2 entries)

SEQ ID NO: 527 - DNA, 27 bp, synthetic construct
  misc_feature 1..27: note = Description of Artificial Sequence: Synthetic oligonucleotide
  source 1..27: mol_type = other DNA
cagcactatattaactggcctctcact

SEQ ID NO: 528 - protein, 9 aa, synthetic construct
  REGION 1..9: note = Description of Artificial Sequence: Synthetic peptide
QHYINWPLT

SEQ ID NO: 529 - DNA, 369 bp, synthetic construct; identical to SEQ ID NO: 513
  misc_feature 1..369: note = Description of Artificial Sequence: Synthetic polynucleotide
  source 1..369: mol_type = other DNA

SEQ ID NO: 530 - protein, 123 aa, synthetic construct; identical to SEQ ID NO: 514
  REGION 1..123: note = Description of Artificial Sequence: Synthetic polypeptide

SEQ ID NO: 531 - DNA, 24 bp, synthetic construct
  misc_feature 1..24: note = Description of Artificial Sequence: Synthetic oligonucleotide
  source 1..24: mol_type = other DNA
ggattcacctttgatgattatacc

SEQ ID NO: 532 - protein, 8 aa, synthetic construct
  REGION 1..8: note = Description of Artificial Sequence: Synthetic peptide
GFTFDDYT

SEQ ID NO: 533 - DNA, 24 bp, synthetic construct
  misc_feature 1..24: note = Description of Artificial Sequence: Synthetic oligonucleotide
  source 1..24: mol_type = other DNA
attagttggaatagtggtagtata

SEQ ID NO: 534 - protein, 8 aa, synthetic construct
  REGION 1..8: note = Description of Artificial Sequence: Synthetic peptide
ISWNSGSI

SEQ ID NO: 535 - DNA, 48 bp, synthetic construct; identical to SEQ ID NO: 519
  misc_feature 1..48: note = Description of Artificial Sequence: Synthetic oligonucleotide
  source 1..48: mol_type = other DNA

SEQ ID NO: 536 - protein, 16 aa, synthetic construct
  REGION 1..16: note = Description of Artificial Sequence: Synthetic peptide
AKDNSGYGHYYYGMDV

SEQ ID NO: 537 - DNA, 321 bp, synthetic construct; identical to SEQ ID NO: 521
  misc_feature 1..321: note = Description of Artificial Sequence: Synthetic polynucleotide
  source 1..321: mol_type = other DNA

SEQ ID NO: 538 - protein, 107 aa, synthetic construct; identical to SEQ ID NO: 522
  REGION 1..107: note = Description of Artificial Sequence: Synthetic polypeptide

SEQ ID NO: 539 - DNA, 18 bp, synthetic construct
  misc_feature 1..18: note = Description of Artificial Sequence: Synthetic oligonucleotide
  source 1..18: mol_type = other DNA
cagagtgttagcagcaac

SEQ ID NO: 540 - protein, 6 aa, synthetic construct
  REGION 1..6: note = Description of Artificial Sequence: Synthetic peptide
QSVSSN

SEQ ID NO: 541-542 - skipped (2 entries)

SEQ ID NO: 543 - DNA, 27 bp, synthetic construct
  misc_feature 1..27: note = Description of Artificial Sequence: Synthetic oligonucleotide
  source 1..27: mol_type = other DNA
cagcactatattaactggcctctcact

SEQ ID NO: 544 - protein, 9 aa, synthetic construct
  REGION 1..9: note = Description of Artificial Sequence: Synthetic peptide
QHYINWPLT

SEQ ID NO: 545 - DNA, 354 bp, synthetic construct
  misc_feature 1..354: note = Description of Artificial Sequence: Synthetic polynucleotide
  source 1..354: mol_type = other DNA
caggtgcagttggtggagtctgggggaggcgtggtccagcctgggaggtccctgagactctcctgtggtgcgtctggattcaccttcagaagttatggcatgcactgggtccgccagactccaggcagggggctggagtgggtggcaatgatatattatgatggaaataataaatactatgcagactccgtgaggggccgattcaccgtttccagagacaattccaagaacaccctgtatctgcaaatgagcagcctgagagccgaggacacggctctatatttctgtgcgcgagggcctgggtacaactggctcgacccctggggccagggaaccctggtcaccgtctcctca

SEQ ID NO: 546 - protein, 118 aa, synthetic construct
  REGION 1..118: note = Description of Artificial Sequence: Synthetic polypeptide
QVQLVESGGGVVQPGRSLRLSCGASGFTFRSYGMHWVRQTPGRGLEWVAMIYYDGNNKYYADSVRGRFTVSRDNSKNTLYLQMSSLRAEDTALYFCARGPGYNWLDPWGQGTLVTVSS

SEQ ID NO: 547 - DNA, 24 bp, synthetic construct
  misc_feature 1..24: note = Description of Artificial Sequence: Synthetic oligonucleotide
  source 1..24: mol_type = other DNA
ggattcaccttcagaagttatggc

SEQ ID NO: 548 - protein, 8 aa, synthetic construct
  REGION 1..8: note = Description of Artificial Sequence: Synthetic peptide
GFTFRSYG

SEQ ID NO: 549 - DNA, 24 bp, synthetic construct
  misc_feature 1..24: note = Description of Artificial Sequence: Synthetic oligonucleotide
  source 1..24: mol_type = other DNA
atatattatgatggaaataataaa

SEQ ID NO: 550 - protein, 8 aa, synthetic construct
  REGION 1..8: note = Description of Artificial Sequence: Synthetic peptide
IYYDGNNK

SEQ ID NO: 551 - DNA, 33 bp, synthetic construct
  misc_feature 1..33: note = Description of Artificial Sequence: Synthetic oligonucleotide
  source 1..33: mol_type = other DNA
gcgcgagggcctgggtacaactggctcgacccc

SEQ ID NO: 552 - protein, 11 aa, synthetic construct
  REGION 1..11: note = Description of Artificial Sequence: Synthetic peptide
ARGPGYNWLDP

SEQ ID NO: 553 - DNA, 321 bp, synthetic construct
  misc_feature 1..321: note = Description of Artificial Sequence: Synthetic polynucleotide
  source 1..321: mol_type = other DNA
gaaatagtgatgacgcagtctccagccaccctgtctgtgtctccaggggaaagagccaccctctcctgcagggccagtcagagtattagcaggaacttggcctggtaccagcaraaacctggccaggctcccaggctcctcatctatggtgcatccaccagggccactggtatcccagccaggttcagtggcagtgggtctgggacagagttcactctcaccatcagcagcctgcagtctgaagattttgcagtttattactgtcagcagtataataaccggcctctcactttcggcggagggaccgaggtggagatcaaa

SEQ ID NO: 554 - protein, 107 aa, synthetic construct
  REGION 1..107: note = Description of Artificial Sequence: Synthetic polypeptide
  VARIANT 38: note = MOD_RES - Any amino acid
EIVMTQSPATLSVSPGERATLSCRASQSISRNLAWYQXKPGQAPRLLIYGASTRATGIPARFSGSGSGTEFTLTISSLQSEDFAVYYCQQYNNRPLTFGGGTEVEIK

SEQ ID NO: 555 - DNA, 18 bp, synthetic construct
  misc_feature 1..18: note = Description of Artificial Sequence: Synthetic oligonucleotide
  source 1..18: mol_type = other DNA
cagagtattagcaggaac

SEQ ID NO: 556 - protein, 6 aa, synthetic construct
  REGION 1..6: note = Description of Artificial Sequence: Synthetic peptide
QSISRN

SEQ ID NO: 557-558 - skipped (2 entries)

SEQ ID NO: 559 - DNA, 27 bp, synthetic construct
  misc_feature 1..27: note = Description of Artificial Sequence: Synthetic oligonucleotide
  source 1..27: mol_type = other DNA
cagcagtataataaccggcctctcact

SEQ ID NO: 560 - protein, 9 aa, synthetic construct
  REGION 1..9: note = Description of Artificial Sequence: Synthetic peptide
QQYNNRPLT

SEQ ID NO: 561 - DNA, 354 bp, synthetic construct
  misc_feature 1..354: note = Description of Artificial Sequence: Synthetic polynucleotide
  source 1..354: mol_type = other DNA
caggtgcagttggtggagtctgggggaggcgtggtccagcctgggaggtccctgagactcgcctgtgttgcgtctggattcaccttcagaagttatggcatgcactgggtccgccaggctccaggcaagggactgcagtgggtggcaatgatttactatgatggtaagaataaatattatgcagactccgtgaggggccgattcaccatctccagagacaattccaagaacacactgtatctgcaaatgaacaatctgagagtcgaggacacggctatgtatttctgtgcgcgagggcctgggtacaattggctcgacccctggggccagggaaccctggtcactgtttcctca

SEQ ID NO: 562 - protein, 118 aa, synthetic construct
  REGION 1..118: note = Description of Artificial Sequence: Synthetic polypeptide
QVQLVESGGGVVQPGRSLRLACVASGFTFRSYGMHWVRQAPGKGLQWVAMIYYDGKNKYYADSVRGRFTISRDNSKNTLYLQMNNLRVEDTAMYFCARGPGYNWLDPWGQGTLVTVSS

SEQ ID NO: 563 - DNA, 24 bp, synthetic construct
  misc_feature 1..24: note = Description of Artificial Sequence: Synthetic oligonucleotide
  source 1..24: mol_type = other DNA
ggattcaccttcagaagttatggc

SEQ ID NO: 564 - protein, 8 aa, synthetic construct
  REGION 1..8: note = Description of Artificial Sequence: Synthetic peptide
GFTFRSYG

SEQ ID NO: 565 - DNA, 24 bp, synthetic construct
  misc_feature 1..24: note = Description of Artificial Sequence: Synthetic oligonucleotide
  source 1..24: mol_type = other DNA
atttactatgatggtaagaataaa

SEQ ID NO: 566 - protein, 8 aa, synthetic construct
  REGION 1..8: note = Description of Artificial Sequence: Synthetic peptide
IYYDGKNK

SEQ ID NO: 567 - DNA, 33 bp, synthetic construct
  misc_feature 1..33: note = Description of Artificial Sequence: Synthetic oligonucleotide
  source 1..33: mol_type = other DNA
gcgcgagggcctgggtacaattggctcgacccc

SEQ ID NO: 568 - protein, 11 aa, synthetic construct
  REGION 1..11: note = Description of Artificial Sequence: Synthetic peptide
ARGPGYNWLDP

SEQ ID NO: 569 - DNA, 321 bp, synthetic construct
  misc_feature 1..321: note = Description of Artificial Sequence: Synthetic polynucleotide
  source 1..321: mol_type = other DNA
gaaatagtgatgacgcagtctccagccaccctgtctgtgtctccaggggaaagagccaccctctcctgcagggccagtcagagaattagcagcaacttggcctggtaccagcaaaaacctggccaggctcccaggctcctcatctatggtgcatccaccagggccactggtagcccagccaggttcagtggcagtgggtctgggacagacttcactctcaccatcagcagcctgcagtctgaggatgttgcagtttattactgtcagcaacatcataactggcctctcactttcggcggagggaccaaggtggagatcaaa

SEQ ID NO: 570 - protein, 107 aa, synthetic construct
  REGION 1..107: note = Description of Artificial Sequence: Synthetic polypeptide
EIVMTQSPATLSVSPGERATLSCRASQRISSNLAWYQQKPGQAPRLLIYGASTRATGSPARFSGSGSGTDFTLTISSLQSEDVAVYYCQQHHNWPLTFGGGTKVEIK

SEQ ID NO: 571 - DNA, 18 bp, synthetic construct
  misc_feature 1..18: note = Description of Artificial Sequence: Synthetic oligonucleotide
  source 1..18: mol_type = other DNA
cagagaattagcagcaac

SEQ ID NO: 572 - protein, 6 aa, synthetic construct
  REGION 1..6: note = Description of Artificial Sequence: Synthetic peptide
QRISSN

SEQ ID NO: 573-574 - skipped (2 entries)

SEQ ID NO: 575 - DNA, 27 bp, synthetic construct
  misc_feature 1..27: note = Description of Artificial Sequence: Synthetic oligonucleotide
  source 1..27: mol_type = other DNA
cagcaacatcataactggcctctcact

SEQ ID NO: 576 - protein, 9 aa, synthetic construct
  REGION 1..9: note = Description of Artificial Sequence: Synthetic peptide
QQHHNWPLT

SEQ ID NO: 577 - DNA, 354 bp, synthetic construct
  misc_feature 1..354: note = Description of Artificial Sequence: Synthetic polynucleotide
  source 1..354: mol_type = other DNA
caggtgcagctggtggagtctgggggaggcgtggtccagcctgggaggtccctgagactctcctgtgctgcgtctggatttaccttcagaagttatgccatgcactgggtccgccaggctccaggcaaggggctggagtgggtggcaatggtatactatgatggaaataatcaatactatgcagactccgtgaggggccgattcaccatctccagagacaattccaagaacacgctgtatctgcaaatgaacagcctgagagccgatgacacggctgtgtatttctgtgcgcgagggcctgggtacaactggctcgacccctggggccagggaaccctggtcaccgtctcctca

SEQ ID NO: 578 - protein, 118 aa, synthetic construct
  REGION 1..118: note = Description of Artificial Sequence: Synthetic polypeptide
QVQLVESGGGVVQPGRSLRLSCAASGFTFRSYAMHWVRQAPGKGLEWVAMVYYDGNNQYYADSVRGRFTISRDNSKNTLYLQMNSLRADDTAVYFCARGPGYNWLDPWGQGTLVTVSS

SEQ ID NO: 579 - DNA, 24 bp, synthetic construct
  misc_feature 1..24: note = Description of Artificial Sequence: Synthetic oligonucleotide
  source 1..24: mol_type = other DNA
ggatttaccttcagaagttatgcc

SEQ ID NO: 580 - protein, 8 aa, synthetic construct
  REGION 1..8: note = Description of Artificial Sequence: Synthetic peptide
GFTFRSYA

SEQ ID NO: 581 - DNA, 24 bp, synthetic construct
  misc_feature 1..24: note = Description of Artificial Sequence: Synthetic oligonucleotide
  source 1..24: mol_type = other DNA
gtatactatgatggaaataatcaa

SEQ ID NO: 582 - protein, 8 aa, synthetic construct
  REGION 1..8: note = Description of Artificial Sequence: Synthetic peptide
VYYDGNNQ

SEQ ID NO: 583 - DNA, 33 bp, synthetic construct; identical to SEQ ID NO: 551
  misc_feature 1..33: note = Description of Artificial Sequence: Synthetic oligonucleotide
  source 1..33: mol_type = other DNA

SEQ ID NO: 584 - protein, 11 aa, synthetic construct
  REGION 1..11: note = Description of Artificial Sequence: Synthetic peptide
ARGPGYNWLDP

SEQ ID NO: 585 - DNA, 321 bp, synthetic construct
  misc_feature 1..321: note = Description of Artificial Sequence: Synthetic polynucleotide
  source 1..321: mol_type = other DNA
gaaatagtgatgacgcagtctccagccaccctgtctgtgtctccaggggaaagagccaccctctcctgcagggccagtcagagtgttagcaggaacttggcctggtaccagcaaaaacctggccaggctcccaggctcctcatctatggtgcatccaccagggccactggtatcccggccaggttcagtggcagtgggtctgggacagacttcactctcaccatcagcagcctgcagtctgaagattttgcagtttattactgtcagcagtataataactggcctctcactttcggcggagggaccaaggtggtgatcaaa

SEQ ID NO: 586 - protein, 107 aa, synthetic construct
  REGION 1..107: note = Description of Artificial Sequence: Synthetic polypeptide
EIVMTQSPATLSVSPGERATLSCRASQSVSRNLAWYQQKPGQAPRLLIYGASTRATGIPARFSGSGSGTDFTLTISSLQSEDFAVYYCQQYNNWPLTFGGGTKVVIK

SEQ ID NO: 587 - DNA, 18 bp, synthetic construct
  misc_feature 1..18: note = Description of Artificial Sequence: Synthetic oligonucleotide
  source 1..18: mol_type = other DNA
cagagtgttagcaggaac

SEQ ID NO: 588 - protein, 6 aa, synthetic construct
  REGION 1..6: note = Description of Artificial Sequence: Synthetic peptide
QSVSRN

SEQ ID NO: 589-590 - skipped (2 entries)

SEQ ID NO: 591 - DNA, 27 bp, synthetic construct
  misc_feature 1..27: note = Description of Artificial Sequence: Synthetic oligonucleotide
  source 1..27: mol_type = other DNA
cagcagtataataactggcctctcact

SEQ ID NO: 592 - protein, 9 aa, synthetic construct
  REGION 1..9: note = Description of Artificial Sequence: Synthetic peptide
QQYNNWPLT

SEQ ID NO: 593 - DNA, 354 bp, synthetic construct
  misc_feature 1..354: note = Description of Artificial Sequence: Synthetic polynucleotide
  source 1..354: mol_type = other DNA
caggtgcagctggtggagtctgggggaggcgtggtccagcctgggaggtccctgagactctcctgtattgcgtctggatttaccttcagaagttatggcatgcactgggtccgccaggctccaggcaaggggctggagtgggtggcaatgatatattatgatggaaacaataaatactatgcagactccgtgaggggccgattcaccatctccagagacaactccaagaacacgctgtatctgcaaatgaacagcctgagagccgatgacacggctgtgtatttctgtgcgcgagggcctgggtacaactggctcgacccctggggccagggaaccctggtcaccgtctcctca

SEQ ID NO: 594 - protein, 118 aa, synthetic construct
  REGION 1..118: note = Description of Artificial Sequence: Synthetic polypeptide
QVQLVESGGGVVQPGRSLRLSCIASGFTFRSYGMHWVRQAPGKGLEWVAMIYYDGNNKYYADSVRGRFTISRDNSKNTLYLQMNSLRADDTAVYFCARGPGYNWLDPWGQGTLVTVSS

SEQ ID NO: 595 - DNA, 24 bp, synthetic construct
  misc_feature 1..24: note = Description of Artificial Sequence: Synthetic oligonucleotide
  source 1..24: mol_type = other DNA
ggatttaccttcagaagttatggc

SEQ ID NO: 596 - protein, 8 aa, synthetic construct
  REGION 1..8: note = Description of Artificial Sequence: Synthetic peptide
GFTFRSYG

SEQ ID NO: 597 - DNA, 24 bp, synthetic construct
  misc_feature 1..24: note = Description of Artificial Sequence: Synthetic oligonucleotide
  source 1..24: mol_type = other DNA
atatattatgatggaaacaataaa

SEQ ID NO: 598 - protein, 8 aa, synthetic construct
  REGION 1..8: note = Description of Artificial Sequence: Synthetic peptide
IYYDGNNK

SEQ ID NO: 599 - DNA, 33 bp, synthetic construct; identical to SEQ ID NO: 551
  misc_feature 1..33: note = Description of Artificial Sequence: Synthetic oligonucleotide
  source 1..33: mol_type = other DNA

SEQ ID NO: 600 - protein, 11 aa, synthetic construct
  REGION 1..11: note = Description of Artificial Sequence: Synthetic peptide
ARGPGYNWLDP

SEQ ID NO: 601 - DNA, 321 bp, synthetic construct
  misc_feature 1..321: note = Description of Artificial Sequence: Synthetic polynucleotide
  source 1..321: mol_type = other DNA
gaaatagtgatgacgcagtctccagccacactgtctgtgtctccaggggaaagagccaccctctcctgcagggccagtcagagtgttagcagcaacttggcctggtaccagcagaaacctggccaggctcccaggctcctcatctatggtgcatccaccagggccactggtatcccagccaggttcagtggcagtgggtctgggacagagttcactctcaccatcagcagcctgcagtctgaagattttgcagtttattactgtcagcagtataataacaggcctctcactttcggcggagggaccaaggtggagatcaaa

SEQ ID NO: 602 - protein, 107 aa, synthetic construct
  REGION 1..107: note = Description of Artificial Sequence: Synthetic polypeptide
EIVMTQSPATLSVSPGERATLSCRASQSVSSNLAWYQQKPGQAPRLLIYGASTRATGIPARFSGSGSGTEFTLTISSLQSEDFAVYYCQQYNNRPLTFGGGTKVEIK

SEQ ID NO: 603 - DNA, 18 bp, synthetic construct
  misc_feature 1..18: note = Description of Artificial Sequence: Synthetic oligonucleotide
  source 1..18: mol_type = other DNA
cagagtgttagcagcaac

SEQ ID NO: 604 - protein, 6 aa, synthetic construct
  REGION 1..6: note = Description of Artificial Sequence: Synthetic peptide
QSVSSN

SEQ ID NO: 605-606 - skipped (2 entries)

SEQ ID NO: 607 - DNA, 27 bp, synthetic construct
  misc_feature 1..27: note = Description of Artificial Sequence: Synthetic oligonucleotide
  source 1..27: mol_type = other DNA
cagcagtataataacaggcctctcact

SEQ ID NO: 608 - protein, 9 aa, synthetic construct
  REGION 1..9: note = Description of Artificial Sequence: Synthetic peptide
QQYNNRPLT

SEQ ID NO: 609 - DNA, 354 bp, synthetic construct
  misc_feature 1..354: note = Description of Artificial Sequence: Synthetic polynucleotide
  source 1..354: mol_type = other DNA
caggtgcagctggtggagtctgggggaggcgtggtccagccggggaggtccctgagactctcctgtgctgcgtctggattcaccttcagaagttttggcatgcactgggtccgccaggctccaggcaggggactggagtgggtggcaatgatatattttgatggaaaaaataaatactatgcagactccgtgaggggccgattcaccatttccagagacaattccaagaacaccctgtatctggaaatgagtagcctgagagccgaggacacggctgtatatttctgtgcgcgagggcctgggtacaactggctcgacccctggggccagggaaccctggtcaccgtctcctca

SEQ ID NO: 610 - protein, 118 aa, synthetic construct
  REGION 1..118: note = Description of Artificial Sequence: Synthetic polypeptide
QVQLVESGGGVVQPGRSLRLSCAASGFTFRSFGMHWVRQAPGRGLEWVAMIYFDGKNKYYADSVRGRFTISRDNSKNTLYLEMSSLRAEDTAVYFCARGPGYNWLDPWGQGTLVTVSS

SEQ ID NO: 611 - DNA, 24 bp, synthetic construct
  misc_feature 1..24: note = Description of Artificial Sequence: Synthetic oligonucleotide
  source 1..24: mol_type = other DNA
ggattcaccttcagaagttttggc

SEQ ID NO: 612 - protein, 8 aa, synthetic construct
  REGION 1..8: note = Description of Artificial Sequence: Synthetic peptide
GFTFRSFG

SEQ ID NO: 613 - DNA, 24 bp, synthetic construct
  misc_feature 1..24: note = Description of Artificial Sequence: Synthetic oligonucleotide
  source 1..24: mol_type = other DNA
atatattttgatggaaaaaataaa

SEQ ID NO: 614 - protein, 8 aa, synthetic construct
  REGION 1..8: note = Description of Artificial Sequence: Synthetic peptide
IYFDGKNK

SEQ ID NO: 615 - DNA, 33 bp, synthetic construct; identical to SEQ ID NO: 551
  misc_feature 1..33: note = Description of Artificial Sequence: Synthetic oligonucleotide
  source 1..33: mol_type = other DNA

SEQ ID NO: 616 - protein, 11 aa, synthetic construct
  REGION 1..11: note = Description of Artificial Sequence: Synthetic peptide
ARGPGYNWLDP

SEQ ID NO: 617 - DNA, 321 bp, synthetic construct
  misc_feature 1..321: note = Description of Artificial Sequence: Synthetic polynucleotide
  source 1..321: mol_type = other DNA
gaaatagtgatgacgcagtctccagccaccctgtctgtgtctccaggggaaagagtcaccctctcctgtagggccagtcagagtattagcaggaacttggcctggtaccagcagaaacctggccaggctcccaggctcctcatctatggtgcatccaccagggccactggtgtcccagccaggttcagtggcagtgggtctgggacagagttcactctcaccatcagcagcctacagtctgaagattttgcagtttttcactgtcagcagtataataataggcctctcactttcggcggagggaccgaggtggagatcaaa

SEQ ID NO: 618 - protein, 107 aa, synthetic construct
  REGION 1..107: note = Description of Artificial Sequence: Synthetic polypeptide
EIVMTQSPATLSVSPGERVTLSCRASQSISRNLAWYQQKPGQAPRLLIYGASTRATGVPARFSGSGSGTEFTLTISSLQSEDFAVFHCQQYNNRPLTFGGGTEVEIK

SEQ ID NO: 619 - DNA, 18 bp, synthetic construct
  misc_feature 1..18: note = Description of Artificial Sequence: Synthetic oligonucleotide
  source 1..18: mol_type = other DNA
cagagtattagcaggaac

SEQ ID NO: 620 - protein, 6 aa, synthetic construct
  REGION 1..6: note = Description of Artificial Sequence: Synthetic peptide
QSISRN

SEQ ID NO: 621-622 - skipped (2 entries)

SEQ ID NO: 623 - DNA, 27 bp, synthetic construct
  misc_feature 1..27: note = Description of Artificial Sequence: Synthetic oligonucleotide
  source 1..27: mol_type = other DNA
cagcagtataataataggcctctcact

SEQ ID NO: 624 - protein, 9 aa, synthetic construct
  REGION 1..9: note = Description of Artificial Sequence: Synthetic peptide
QQYNNRPLT

SEQ ID NO: 625 - DNA, 354 bp, synthetic construct
  misc_feature 1..354: note = Description of Artificial Sequence: Synthetic polynucleotide
  source 1..354: mol_type = other DNA
caggtgcaattggtggagtctgggggaggcgtggtccagccggggaggtccctgagactctcctgtgctgcgtctggattcaccttcagaagttttggcatgcactgggtccgccaggctccaggcaggggactggagtgggtggcaatgatatattttgatggaaaaaataaatactatgcagactccgtgaggggccgattcaccatttccagagacaattccaagaacaccctgtatctggaaatgagtagcctgagagccgaggacacggctgtatatttctgtgcgcgagggcctgggtacaactggctcgacccctggggccagggaaccctggtcaccgtctcctca

SEQ ID NO: 626 - protein, 118 aa, synthetic construct; identical to SEQ ID NO: 610
  REGION 1..118: note = Description of Artificial Sequence: Synthetic polypeptide

SEQ ID NO: 627 - DNA, 24 bp, synthetic construct
  misc_feature 1..24: note = Description of Artificial Sequence: Synthetic oligonucleotide
  source 1..24: mol_type = other DNA
ggattcaccttcagaagttttggc

SEQ ID NO: 628 - protein, 8 aa, synthetic construct
  REGION 1..8: note = Description of Artificial Sequence: Synthetic peptide
GFTFRSFG

SEQ ID NO: 629 - DNA, 24 bp, synthetic construct
  misc_feature 1..24: note = Description of Artificial Sequence: Synthetic oligonucleotide
  source 1..24: mol_type = other DNA
atatattttgatggaaaaaataaa

SEQ ID NO: 630 - protein, 8 aa, synthetic construct
  REGION 1..8: note = Description of Artificial Sequence: Synthetic peptide
IYFDGKNK

SEQ ID NO: 631 - DNA, 33 bp, synthetic construct; identical to SEQ ID NO: 551
  misc_feature 1..33: note = Description of Artificial Sequence: Synthetic oligonucleotide
  source 1..33: mol_type = other DNA

SEQ ID NO: 632 - protein, 11 aa, synthetic construct
  REGION 1..11: note = Description of Artificial Sequence: Synthetic peptide
ARGPGYNWLDP

SEQ ID NO: 633 - DNA, 321 bp, synthetic construct
  misc_feature 1..321: note = Description of Artificial Sequence: Synthetic polynucleotide
  source 1..321: mol_type = other DNA
gaaatagtgatgacgcagtctccagccaccctgtctgtgtctccaggggaaagagtcaccctctcctgtagggccagtcagagtattagcaggaacttggcctggtaccagcaraaacctggccaggctcccaggctcctcatctatggtgcatccaccagggccactggtgtcccagccaggttcagtggcagtgggtctgggacagagttcactctcaccatcagcagcctacagtctgaagattttgcagtttttcactgtcagcagtataataataggcctctcactttcggcggagggaccgaggtggagatcaaa

SEQ ID NO: 634 - protein, 107 aa, synthetic construct
  REGION 1..107: note = Description of Artificial Sequence: Synthetic polypeptide
  VARIANT 38: note = MOD_RES - Any amino acid
EIVMTQSPATLSVSPGERVTLSCRASQSISRNLAWYQXKPGQAPRLLIYGASTRATGVPARFSGSGSGTEFTLTISSLQSEDFAVFHCQQYNNRPLTFGGGTEVEIK

SEQ ID NO: 635 - DNA, 18 bp, synthetic construct
  misc_feature 1..18: note = Description of Artificial Sequence: Synthetic oligonucleotide
  source 1..18: mol_type = other DNA
cagagtattagcaggaac

SEQ ID NO: 636 - protein, 6 aa, synthetic construct
  REGION 1..6: note = Description of Artificial Sequence: Synthetic peptide
QSISRN

SEQ ID NO: 637-638 - skipped (2 entries)

SEQ ID NO: 639 - DNA, 27 bp, synthetic construct
  misc_feature 1..27: note = Description of Artificial Sequence: Synthetic oligonucleotide
  source 1..27: mol_type = other DNA
cagcagtataataataggcctctcact

SEQ ID NO: 640 - protein, 9 aa, synthetic construct
  REGION 1..9: note = Description of Artificial Sequence: Synthetic peptide
QQYNNRPLT

SEQ ID NO: 641 - DNA, 354 bp, synthetic construct
  misc_feature 1..354: note = Description of Artificial Sequence: Synthetic polynucleotide
  source 1..354: mol_type = other DNA
caggtgcaattggtggagtctgggggaggcgtggtccagccggggaggtccctgagactctcctgtgctgcgtctggattcaccttcagaagttttggcatgcactgggtccgccaggctccaggcaggggactggagtgggtggcaatgatatattttgatggaaaaaataaatactatgcagactccgtgaggggccgattcaccatttccagagacaattccaagaacaccctgtatctggaaatgagcagcctgagagccgaggacacggctgtatatttctgtgcgcgagggcctgggtacaattggctcgacccctggggccagggaaccctggtcaccgtctcctca

SEQ ID NO: 642 - protein, 118 aa, synthetic construct; identical to SEQ ID NO: 610
  REGION 1..118: note = Description of Artificial Sequence: Synthetic polypeptide

SEQ ID NO: 643 - DNA, 24 bp, synthetic construct
  misc_feature 1..24: note = Description of Artificial Sequence: Synthetic oligonucleotide
  source 1..24: mol_type = other DNA
ggattcaccttcagaagttttggc

SEQ ID NO: 644 - protein, 8 aa, synthetic construct
  REGION 1..8: note = Description of Artificial Sequence: Synthetic peptide
GFTFRSFG

SEQ ID NO: 645 - DNA, 24 bp, synthetic construct
  misc_feature 1..24: note = Description of Artificial Sequence: Synthetic oligonucleotide
  source 1..24: mol_type = other DNA
atatattttgatggaaaaaataaa

SEQ ID NO: 646 - protein, 8 aa, synthetic construct
  REGION 1..8: note = Description of Artificial Sequence: Synthetic peptide
IYFDGKNK

SEQ ID NO: 647 - DNA, 33 bp, synthetic construct; identical to SEQ ID NO: 567
  misc_feature 1..33: note = Description of Artificial Sequence: Synthetic oligonucleotide
  source 1..33: mol_type = other DNA

SEQ ID NO: 648 - protein, 11 aa, synthetic construct
  REGION 1..11: note = Description of Artificial Sequence: Synthetic peptide
ARGPGYNWLDP

SEQ ID NO: 649 - DNA, 321 bp, synthetic construct
  misc_feature 1..321: note = Description of Artificial Sequence: Synthetic polynucleotide
  source 1..321: mol_type = other DNA
gaaatagtgatgacgcagtctccagccaccctgtctgtgtctccaggggaaagagccaccctctcctgtagggccagtcagagtgttagcaggaacttggcctggtaccagcaaaaacctggccaggctcccaggctcctcatctatggtgcatccaccagggccactggtgtcccagccaggttcagtggcagtgggtctgggacagagttcactctcaccatcagcagcctacagtctgaagattttgcagtttttcactgtcagcagtataataataggcctctcactttcggcggagggaccgaggtggagatcaaa

SEQ ID NO: 650 - protein, 107 aa, synthetic construct
  REGION 1..107: note = Description of Artificial Sequence: Synthetic polypeptide
EIVMTQSPATLSVSPGERATLSCRASQSVSRNLAWYQQKPGQAPRLLIYGASTRATGVPARFSGSGSGTEFTLTISSLQSEDFAVFHCQQYNNRPLTFGGGTEVEIK

SEQ ID NO: 651 - DNA, 18 bp, synthetic construct
  misc_feature 1..18: note = Description of Artificial Sequence: Synthetic oligonucleotide
  source 1..18: mol_type = other DNA
cagagtgttagcaggaac

SEQ ID NO: 652 - protein, 6 aa, synthetic construct
  REGION 1..6: note = Description of Artificial Sequence: Synthetic peptide
QSVSRN

SEQ ID NO: 653-654 - skipped (2 entries)

SEQ ID NO: 655 - DNA, 27 bp, synthetic construct
  misc_feature 1..27: note = Description of Artificial Sequence: Synthetic oligonucleotide
  source 1..27: mol_type = other DNA
cagcagtataataataggcctctcact

SEQ ID NO: 656 - protein, 9 aa, synthetic construct
  REGION 1..9: note = Description of Artificial Sequence: Synthetic peptide
QQYNNRPLT

SEQ ID NO: 657 - DNA, 354 bp, synthetic construct; identical to SEQ ID NO: 641
  misc_feature 1..354: note = Description of Artificial Sequence: Synthetic polynucleotide
  source 1..354: mol_type = other DNA

SEQ ID NO: 658 - protein, 118 aa, synthetic construct; identical to SEQ ID NO: 610
  REGION 1..118: note = Description of Artificial Sequence: Synthetic polypeptide

SEQ ID NO: 659 - DNA, 24 bp, synthetic construct
  misc_feature 1..24: note = Description of Artificial Sequence: Synthetic oligonucleotide
  source 1..24: mol_type = other DNA
ggattcaccttcagaagttttggc

SEQ ID NO: 660 - protein, 8 aa, synthetic construct
  REGION 1..8: note = Description of Artificial Sequence: Synthetic peptide
GFTFRSFG

SEQ ID NO: 661 - DNA, 24 bp, synthetic construct
  misc_feature 1..24: note = Description of Artificial Sequence: Synthetic oligonucleotide
  source 1..24: mol_type = other DNA
atatattttgatggaaaaaataaa

SEQ ID NO: 662 - protein, 8 aa, synthetic construct
  REGION 1..8: note = Description of Artificial Sequence: Synthetic peptide
IYFDGKNK

SEQ ID NO: 663 - DNA, 33 bp, synthetic construct; identical to SEQ ID NO: 567
  misc_feature 1..33: note = Description of Artificial Sequence: Synthetic oligonucleotide
  source 1..33: mol_type = other DNA

SEQ ID NO: 664 - protein, 11 aa, synthetic construct
  REGION 1..11: note = Description of Artificial Sequence: Synthetic peptide
ARGPGYNWLDP

SEQ ID NO: 665 - DNA, 321 bp, synthetic construct; identical to SEQ ID NO: 649
  misc_feature 1..321: note = Description of Artificial Sequence: Synthetic polynucleotide
  source 1..321: mol_type = other DNA

SEQ ID NO: 666 - protein, 107 aa, synthetic construct; identical to SEQ ID NO: 650
  REGION 1..107: note = Description of Artificial Sequence: Synthetic polypeptide

SEQ ID NO: 667 - DNA, 18 bp, synthetic construct
  misc_feature 1..18: note = Description of Artificial Sequence: Synthetic oligonucleotide
  source 1..18: mol_type = other DNA
cagagtgttagcaggaac

SEQ ID NO: 668 - protein, 6 aa, synthetic construct
  REGION 1..6: note = Description of Artificial Sequence: Synthetic peptide
QSVSRN

SEQ ID NO: 669-670 - skipped (2 entries)

SEQ ID NO: 671 - DNA, 27 bp, synthetic construct
  misc_feature 1..27: note = Description of Artificial Sequence: Synthetic oligonucleotide
  source 1..27: mol_type = other DNA
cagcagtataataataggcctctcact

SEQ ID NO: 672 - protein, 9 aa, synthetic construct
  REGION 1..9: note = Description of Artificial Sequence: Synthetic peptide
QQYNNRPLT

SEQ ID NO: 673 - DNA, 354 bp, synthetic construct
  misc_feature 1..354: note = Description of Artificial Sequence: Synthetic polynucleotide
  source 1..354: mol_type = other DNA
caggtgcagttggtggagtctgggggaggcgtggtccagcctgggaggtccctgagactctcctgtgttgcgtctggattcaccttcagaagttatggcatgcactgggtccgccaggctccaggcaagggactgcagtgggtggcaatgatttactatgatggtaagaataaatattatgcagactccgtgaggggccgattcaccatctccagagacaattccaagaacacgctgtatctgcaaatgaacagtctgagagccgaagacacggctatgtatttctgtgcgcgagggcctgggtacaactggctcgacccctggggccagggaaccctggtcactgtctcctca

SEQ ID NO: 674 - protein, 118 aa, synthetic construct
  REGION 1..118: note = Description of Artificial Sequence: Synthetic polypeptide
QVQLVESGGGVVQPGRSLRLSCVASGFTFRSYGMHWVRQAPGKGLQWVAMIYYDGKNKYYADSVRGRFTISRDNSKNTLYLQMNSLRAEDTAMYFCARGPGYNWLDPWGQGTLVTVSS

SEQ ID NO: 675 - DNA, 24 bp, synthetic construct
  misc_feature 1..24: note = Description of Artificial Sequence: Synthetic oligonucleotide
  source 1..24: mol_type = other DNA
ggattcaccttcagaagttatggc

SEQ ID NO: 676 - protein, 8 aa, synthetic construct
  REGION 1..8: note = Description of Artificial Sequence: Synthetic peptide
GFTFRSYG

SEQ ID NO: 677 - DNA, 24 bp, synthetic construct
  misc_feature 1..24: note = Description of Artificial Sequence: Synthetic oligonucleotide
  source 1..24: mol_type = other DNA
atttactatgatggtaagaataaa

SEQ ID NO: 678 - protein, 8 aa, synthetic construct
  REGION 1..8: note = Description of Artificial Sequence: Synthetic peptide
IYYDGKNK

SEQ ID NO: 679 - DNA, 33 bp, synthetic construct; identical to SEQ ID NO: 551
  misc_feature 1..33: note = Description of Artificial Sequence: Synthetic oligonucleotide
  source 1..33: mol_type = other DNA

SEQ ID NO: 680 - protein, 11 aa, synthetic construct
  REGION 1..11: note = Description of Artificial Sequence: Synthetic peptide
ARGPGYNWLDP

SEQ ID NO: 681 - DNA, 321 bp, synthetic construct
  misc_feature 1..321: note = Description of Artificial Sequence: Synthetic polynucleotide
  source 1..321: mol_type = other DNA
gaaatagtgatgacgcagtctccagccaccctgtctgtgtctccaggggaaagagccaccctctcctgcagggccagtcagagaattagcagcaacttggcctggtaccagcaaaaacctggccaggctcccaggctcctcatctatggtgcatccaccagggccactggtagcccagccaggttcagtggcagtgggtctgggacagagttcactctcaccatcagcagcctgcagtctgaagatgttgcagtttattactgtcagcaacataataactggcctctcactttcggcggagggaccaaggtggagatcaaa

SEQ ID NO: 682 - protein, 107 aa, synthetic construct
  REGION 1..107: note = Description of Artificial Sequence: Synthetic polypeptide
EIVMTQSPATLSVSPGERATLSCRASQRISSNLAWYQQKPGQAPRLLIYGASTRATGSPARFSGSGSGTEFTLTISSLQSEDVAVYYCQQHNNWPLTFGGGTKVEIK

SEQ ID NO: 683 - DNA, 18 bp, synthetic construct
  misc_feature 1..18: note = Description of Artificial Sequence: Synthetic oligonucleotide
  source 1..18: mol_type = other DNA
cagagaattagcagcaac

SEQ ID NO: 684 - protein, 6 aa, synthetic construct
  REGION 1..6: note = Description of Artificial Sequence: Synthetic peptide
QRISSN

SEQ ID NO: 685-686 - skipped (2 entries)

SEQ ID NO: 687 - DNA, 27 bp, synthetic construct
  misc_feature 1..27: note = Description of Artificial Sequence: Synthetic oligonucleotide
  source 1..27: mol_type = other DNA
cagcaacataataactggcctctcact

SEQ ID NO: 688 - protein, 9 aa, synthetic construct
  REGION 1..9: note = Description of Artificial Sequence: Synthetic peptide
QQHNNWPLT

SEQ ID NO: 689 - DNA, 354 bp, synthetic construct
  misc_feature 1..354: note = Description of Artificial Sequence: Synthetic polynucleotide
  source 1..354: mol_type = other DNA
caggtgcaattggtggagtctgggggaggcgtggtccagccggggaggtccctgagactctcctgtgctgcgtctggtttcaccttcagaagttttggcatgcactgggtccgccaggctccaggcaggggactggagtgggtggcaatgatatattttgatggaaaaaataaatactatgcagactccgtgaggggccgattcaccatttccagagacaattccaagaacaccctgtatctggaaatgagtagcctgagagccgaggacacggctgtatatttctgtgcgcgagggcctgggtacaactggctcgacccctggggccagggaaccctggtcaccgtctcctca

SEQ ID NO: 690 - protein, 118 aa, synthetic construct; identical to SEQ ID NO: 610
  REGION 1..118: note = Description of Artificial Sequence: Synthetic polypeptide

SEQ ID NO: 691 - DNA, 24 bp, synthetic construct
  misc_feature 1..24: note = Description of Artificial Sequence: Synthetic oligonucleotide
  source 1..24: mol_type = other DNA
ggtttcaccttcagaagttttggc

SEQ ID NO: 692 - protein, 8 aa, synthetic construct
  REGION 1..8: note = Description of Artificial Sequence: Synthetic peptide
GFTFRSFG

SEQ ID NO: 693 - DNA, 24 bp, synthetic construct
  misc_feature 1..24: note = Description of Artificial Sequence: Synthetic oligonucleotide
  source 1..24: mol_type = other DNA
atatattttgatggaaaaaataaa

SEQ ID NO: 694 - protein, 8 aa, synthetic construct
  REGION 1..8: note = Description of Artificial Sequence: Synthetic peptide
IYFDGKNK

SEQ ID NO: 695 - DNA, 33 bp, synthetic construct; identical to SEQ ID NO: 551
  misc_feature 1..33: note = Description of Artificial Sequence: Synthetic oligonucleotide
  source 1..33: mol_type = other DNA

SEQ ID NO: 696 - protein, 11 aa, synthetic construct
  REGION 1..11: note = Description of Artificial Sequence: Synthetic peptide
ARGPGYNWLDP

SEQ ID NO: 697 - DNA, 321 bp, synthetic construct
  misc_feature 1..321: note = Description of Artificial Sequence: Synthetic polynucleotide
  source 1..321: mol_type = other DNA
gaaatagtgatgacgcagtctccagccaccctgtctgtgtctccaggggaaagagtcatcctctcctgtagggccagtcagagtattagcaggaacttggcctggtaccagcaaaaacctggccaggctcccaggctcctcatctatggtgcaaccaccagggccactggtgtcccagccaggttcagtggcagtgggtctgggacagagttcactctcaccatcagcagcctacagtctgaagattttgcagttttttactgtcagcagtataataataggcctctcactttcggcggagggaccgaggtggagatcaaa

SEQ ID NO: 698 - protein, 107 aa, synthetic construct
  REGION 1..107: note = Description of Artificial Sequence: Synthetic polypeptide
EIVMTQSPATLSVSPGERVILSCRASQSISRNLAWYQQKPGQAPRLLIYGATTRATGVPARFSGSGSGTEFTLTISSLQSEDFAVFYCQQYNNRPLTFGGGTEVEIK

SEQ ID NO: 699 - DNA, 18 bp, synthetic construct
  misc_feature 1..18: note = Description of Artificial Sequence: Synthetic oligonucleotide
  source 1..18: mol_type = other DNA
cagagtattagcaggaac

SEQ ID NO: 700 - protein, 6 aa, synthetic construct
  REGION 1..6: note = Description of Artificial Sequence: Synthetic peptide
QSISRN

SEQ ID NO: 701-702 - skipped (2 entries)

SEQ ID NO: 703 - DNA, 27 bp, synthetic construct
  misc_feature 1..27: note = Description of Artificial Sequence: Synthetic oligonucleotide
  source 1..27: mol_type = other DNA
cagcagtataataataggcctctcact

SEQ ID NO: 704 - protein, 9 aa, synthetic construct
  REGION 1..9: note = Description of Artificial Sequence: Synthetic peptide
QQYNNRPLT

SEQ ID NO: 705 - DNA, 354 bp, synthetic construct; identical to SEQ ID NO: 689
  misc_feature 1..354: note = Description of Artificial Sequence: Synthetic polynucleotide
  source 1..354: mol_type = other DNA

SEQ ID NO: 706 - protein, 118 aa, synthetic construct; identical to SEQ ID NO: 610
  REGION 1..118: note = Description of Artificial Sequence: Synthetic polypeptide

SEQ ID NO: 707 - DNA, 24 bp, synthetic construct
  misc_feature 1..24: note = Description of Artificial Sequence: Synthetic oligonucleotide
  source 1..24: mol_type = other DNA
ggtttcaccttcagaagttttggc

SEQ ID NO: 708 - protein, 8 aa, synthetic construct
  REGION 1..8: note = Description of Artificial Sequence: Synthetic peptide
GFTFRSFG

SEQ ID NO: 709 - DNA, 24 bp, synthetic construct
  misc_feature 1..24: note = Description of Artificial Sequence: Synthetic oligonucleotide
  source 1..24: mol_type = other DNA
atatattttgatggaaaaaataaa

SEQ ID NO: 710 - protein, 8 aa, synthetic construct
  REGION 1..8: note = Description of Artificial Sequence: Synthetic peptide
IYFDGKNK

SEQ ID NO: 711 - DNA, 33 bp, synthetic construct; identical to SEQ ID NO: 551
  misc_feature 1..33: note = Description of Artificial Sequence: Synthetic oligonucleotide
  source 1..33: mol_type = other DNA

SEQ ID NO: 712 - protein, 11 aa, synthetic construct
  REGION 1..11: note = Description of Artificial Sequence: Synthetic peptide
ARGPGYNWLDP

SEQ ID NO: 713 - DNA, 321 bp, synthetic construct
  misc_feature 1..321: note = Description of Artificial Sequence: Synthetic polynucleotide
  source 1..321: mol_type = other DNA
gaaatagtgatgacgcagtctccagccaccctgtctgtgtctccaggggaaagagtcatcctctcctgtagggccagtcagagtattagcaggaacttggcctggtaccagcaraaacctggccaggctcccaggctcctcatctatggtgcaaccaccagggccactggtgtcccagccaggttcagtggcagtgggtctgggacagagttcactctcaccatcagcagcctacagtctgaagattttgcagttttttactgtcagcagtataataataggcctctcactttcggcggagggaccgaggtggagatcaaa

SEQ ID NO: 714 - protein, 107 aa, synthetic construct
  REGION 1..107: note = Description of Artificial Sequence: Synthetic polypeptide
  VARIANT 38: note = MOD_RES - Any amino acid
EIVMTQSPATLSVSPGERVILSCRASQSISRNLAWYQXKPGQAPRLLIYGATTRATGVPARFSGSGSGTEFTLTISSLQSEDFAVFYCQQYNNRPLTFGGGTEVEIK

SEQ ID NO: 715 - DNA, 18 bp, synthetic construct
  misc_feature 1..18: note = Description of Artificial Sequence: Synthetic oligonucleotide
  source 1..18: mol_type = other DNA
cagagtattagcaggaac

SEQ ID NO: 716 - protein, 6 aa, synthetic construct
  REGION 1..6: note = Description of Artificial Sequence: Synthetic peptide
QSISRN

SEQ ID NO: 717-718 - skipped (2 entries)

SEQ ID NO: 719 - DNA, 27 bp, synthetic construct
  misc_feature 1..27: note = Description of Artificial Sequence: Synthetic oligonucleotide
  source 1..27: mol_type = other DNA
cagcagtataataataggcctctcact

SEQ ID NO: 720 - protein, 9 aa, synthetic construct
  REGION 1..9: note = Description of Artificial Sequence: Synthetic peptide
QQYNNRPLT

SEQ ID NO: 721 - DNA, 354 bp, synthetic construct; identical to SEQ ID NO: 593
  misc_feature 1..354: note = Description of Artificial Sequence: Synthetic polynucleotide
  source 1..354: mol_type = other DNA

SEQ ID NO: 722 - protein, 118 aa, synthetic construct; identical to SEQ ID NO: 594
  REGION 1..118: note = Description of Artificial Sequence: Synthetic polypeptide

SEQ ID NO: 723 - DNA, 24 bp, synthetic construct
  misc_feature 1..24: note = Description of Artificial Sequence: Synthetic oligonucleotide
  source 1..24: mol_type = other DNA
ggatttaccttcagaagttatggc

SEQ ID NO: 724 - protein, 8 aa, synthetic construct
  REGION 1..8: note = Description of Artificial Sequence: Synthetic peptide
GFTFRSYG

SEQ ID NO: 725 - DNA, 24 bp, synthetic construct
  misc_feature 1..24: note = Description of Artificial Sequence: Synthetic oligonucleotide
  source 1..24: mol_type = other DNA
atatattatgatggaaacaataaa

SEQ ID NO: 726 - protein, 8 aa, synthetic construct
  REGION 1..8: note = Description of Artificial Sequence: Synthetic peptide
IYYDGNNK

SEQ ID NO: 727 - DNA, 33 bp, synthetic construct; identical to SEQ ID NO: 551
  misc_feature 1..33: note = Description of Artificial Sequence: Synthetic oligonucleotide
  source 1..33: mol_type = other DNA

SEQ ID NO: 728 - protein, 11 aa, synthetic construct
  REGION 1..11: note = Description of Artificial Sequence: Synthetic peptide
ARGPGYNWLDP

SEQ ID NO: 729 - DNA, 321 bp, synthetic construct; identical to SEQ ID NO: 601
  misc_feature 1..321: note = Description of Artificial Sequence: Synthetic polynucleotide
  source 1..321: mol_type = other DNA

SEQ ID NO: 730 - protein, 107 aa, synthetic construct; identical to SEQ ID NO: 602
  REGION 1..107: note = Description of Artificial Sequence: Synthetic polypeptide

SEQ ID NO: 731 - DNA, 18 bp, synthetic construct
  misc_feature 1..18: note = Description of Artificial Sequence: Synthetic oligonucleotide
  source 1..18: mol_type = other DNA
cagagtgttagcagcaac

SEQ ID NO: 732 - protein, 6 aa, synthetic construct
  REGION 1..6: note = Description of Artificial Sequence: Synthetic peptide
QSVSSN

SEQ ID NO: 733-734 - skipped (2 entries)

SEQ ID NO: 735 - DNA, 27 bp, synthetic construct
  misc_feature 1..27: note = Description of Artificial Sequence: Synthetic oligonucleotide
  source 1..27: mol_type = other DNA
cagcagtataataacaggcctctcact

SEQ ID NO: 736 - protein, 9 aa, synthetic construct
  REGION 1..9: note = Description of Artificial Sequence: Synthetic peptide
QQYNNRPLT

SEQ ID NO: 737 - DNA, 372 bp, synthetic construct
  misc_feature 1..372: note = Description of Artificial Sequence: Synthetic polynucleotide
  source 1..372: mol_type = other DNA
gaagtgcagctggtggagtctgggggaggcttggtacagcctggcaggtccctgagactctcctgtgcagcctctggattcacctttgatgattattccatgcactgggtccggcaagctccagggaagggcctggagtgggtctcaggtattagttggaatagtcgtagcatagactatgcggactctgtgaagggccgattcaccatctccagagacaacgccaagaactccctgtatctgcaaatgaacagtctgagagctgaggacacggccttgtattactgtgtaaaagataatagtggctatggccgctattactactacgggatggacgtctggggccaagggaccacggtctccgtctcctca

SEQ ID NO: 738 - protein, 124 aa, synthetic construct
  REGION 1..124: note = Description of Artificial Sequence: Synthetic polypeptide
EVQLVESGGGLVQPGRSLRLSCAASGFTFDDYSMHWVRQAPGKGLEWVSGISWNSRSIDYADSVKGRFTISRDNAKNSLYLQMNSLRAEDTALYYCVKDNSGYGRYYYYGMDVWGQGTTVSVSS

SEQ ID NO: 739 - DNA, 24 bp, synthetic construct
  misc_feature 1..24: note = Description of Artificial Sequence: Synthetic oligonucleotide
  source 1..24: mol_type = other DNA
ggattcacctttgatgattattcc

SEQ ID NO: 740 - protein, 8 aa, synthetic construct
  REGION 1..8: note = Description of Artificial Sequence: Synthetic peptide
GFTFDDYS

SEQ ID NO: 741 - DNA, 24 bp, synthetic construct
  misc_feature 1..24: note = Description of Artificial Sequence: Synthetic oligonucleotide
  source 1..24: mol_type = other DNA
attagttggaatagtcgtagcata

SEQ ID NO: 742 - protein, 8 aa, synthetic construct
  REGION 1..8: note = Description of Artificial Sequence: Synthetic peptide
ISWNSRSI

SEQ ID NO: 743 - DNA, 51 bp, synthetic construct
  misc_feature 1..51: note = Description of Artificial Sequence: Synthetic oligonucleotide
  source 1..51: mol_type = other DNA
gtaaaagataatagtggctatggccgctattactactacgggatggacgtc

SEQ ID NO: 744 - protein, 17 aa, synthetic construct
  REGION 1..17: note = Description of Artificial Sequence: Synthetic peptide
VKDNSGYGRYYYYGMDV

SEQ ID NO: 745 - DNA, 321 bp, synthetic construct
  misc_feature 1..321: note = Description of Artificial Sequence: Synthetic polynucleotide
  source 1..321: mol_type = other DNA
aaaatagtgatgacgcagtctcccgccaccctgtctgtgtctccaggggaaagagccaccctctcctgcagggccagtcagagtgttagcggcaacttagcctggtaccagcaaaaacctggccaggctcccaggctcctcatctatggtgcatccaccagggccactagtatcccagccaggttcagtggcagtgggtctgggacagagttcactctcaccatcagcagcctgcagtctgaagattttgcagtttatttctgtcagcactattataactggcctctcactttcggcggagggaccaaggtggagatcaga

SEQ ID NO: 746 - protein, 107 aa, synthetic construct
  REGION 1..107: note = Description of Artificial Sequence: Synthetic polypeptide
KIVMTQSPATLSVSPGERATLSCRASQSVSGNLAWYQQKPGQAPRLLIYGASTRATSIPARFSGSGSGTEFTLTISSLQSEDFAVYFCQHYYNWPLTFGGGTKVEIR

SEQ ID NO: 747 - DNA, 18 bp, synthetic construct
  misc_feature 1..18: note = Description of Artificial Sequence: Synthetic oligonucleotide
  source 1..18: mol_type = other DNA
cagagtgttagcggcaac

SEQ ID NO: 748 - protein, 6 aa, synthetic construct
  REGION 1..6: note = Description of Artificial Sequence: Synthetic peptide
QSVSGN

SEQ ID NO: 749-750 - skipped (2 entries)

SEQ ID NO: 751 - DNA, 27 bp, synthetic construct
  misc_feature 1..27: note = Description of Artificial Sequence: Synthetic oligonucleotide
  source 1..27: mol_type = other DNA
cagcactattataactggcctctcact

SEQ ID NO: 752 - protein, 9 aa, synthetic construct
  REGION 1..9: note = Description of Artificial Sequence: Synthetic peptide
QHYYNWPLT

SEQ ID NO: 753 - DNA, 369 bp, synthetic construct; identical to SEQ ID NO: 401
  misc_feature 1..369: note = Description of Artificial Sequence: Synthetic polynucleotide
  source 1..369: mol_type = other DNA

SEQ ID NO: 754 - protein, 123 aa, synthetic construct; identical to SEQ ID NO: 402
  REGION 1..123: note = Description of Artificial Sequence: Synthetic polypeptide

SEQ ID NO: 755 - DNA, 24 bp, synthetic construct
  misc_feature 1..24: note = Description of Artificial Sequence: Synthetic oligonucleotide
  source 1..24: mol_type = other DNA
ggattcacctttgatgattttacc

SEQ ID NO: 756 - protein, 8 aa, synthetic construct
  REGION 1..8: note = Description of Artificial Sequence: Synthetic peptide
GFTFDDFT

SEQ ID NO: 757 - DNA, 24 bp, synthetic construct
  misc_feature 1..24: note = Description of Artificial Sequence: Synthetic oligonucleotide
  source 1..24: mol_type = other DNA
atcagttggaatagtggtagcata

SEQ ID NO: 758 - protein, 8 aa, synthetic construct
  REGION 1..8: note = Description of Artificial Sequence: Synthetic peptide
ISWNSGSI

SEQ ID NO: 759 - DNA, 48 bp, synthetic construct; identical to SEQ ID NO: 407
  misc_feature 1..48: note = Description of Artificial Sequence: Synthetic oligonucleotide
  source 1..48: mol_type = other DNA

SEQ ID NO: 760 - protein, 16 aa, synthetic construct
  REGION 1..16: note = Description of Artificial Sequence: Synthetic peptide
AKDNSGYGYYYYGMDV

SEQ ID NO: 761 - DNA, 339 bp, synthetic construct
  misc_feature 1..339: note = Description of Artificial Sequence: Synthetic polynucleotide
  source 1..339: mol_type = other DNA
gacatcgtgatgacccagtctccagactccctggctgtgtctctgggcgagagggccaccatcaactgcaagtccagccagagtgttttatacagctccaacaataagaactacttagcttggtaccagcagaaaccaggacagcctcctaagctgctcatttactgggcatctacccgggaatccggggtccctgaccgattcagtggcagcgggtctgggacagatttcactctcaccatcagcagcctgcaggctgaagatgtggcagtttattactgtcagcaatattatagtactccgtacacttttggccaggggaccaagctggagatcaaa

SEQ ID NO: 762 - protein, 113 aa, synthetic construct
  REGION 1..113: note = Description of Artificial Sequence: Synthetic polypeptide
DIVMTQSPDSLAVSLGERATINCKSSQSVLYSSNNKNYLAWYQQKPGQPPKLLIYWASTRESGVPDRFSGSGSGTDFTLTISSLQAEDVAVYYCQQYYSTPYTFGQGTKLEIK

SEQ ID NO: 763 - DNA, 36 bp, synthetic construct
  misc_feature 1..36: note = Description of Artificial Sequence: Synthetic oligonucleotide
  source 1..36: mol_type = other DNA
cagagtgttttatacagctccaacaataagaactac

SEQ ID NO: 764 - protein, 12 aa, synthetic construct
  REGION 1..12: note = Description of Artificial Sequence: Synthetic peptide
QSVLYSSNNKNY

SEQ ID NO: 765-766 - skipped (2 entries)

SEQ ID NO: 767 - DNA, 27 bp, synthetic construct
  misc_feature 1..27: note = Description of Artificial Sequence: Synthetic oligonucleotide
  source 1..27: mol_type = other DNA
cagcaatattatagtactccgtacact

SEQ ID NO: 768 - protein, 9 aa, synthetic construct
  REGION 1..9: note = Description of Artificial Sequence: Synthetic peptide
QQYYSTPYT

SEQ ID NO: 769 - DNA, 369 bp, synthetic construct
  misc_feature 1..369: note = Description of Artificial Sequence: Synthetic polynucleotide
  source 1..369: mol_type = other DNA
caggtcaccttgaaggagtctggtcctgcgctggtgaaacccacacagaccctcacactgacctgcaccttctctgggttctcactcagcactagtggaatgtgtgtgagctggatccgtcagcccccagggaaggccctggagtggcttgcacgcattgattgggatgatgataaatactacagcacatctctgaagaccaggctcaccatctccaaggacacctccaaaaaccaggtggtccttacaatgaccaacatggaccctgtggacacagccacgtattactgtgcacggatggatatagtgggagctagaggggggtggttcgacccctggggccagggaaccctggtcaccgtctcctca

SEQ ID NO: 770 - protein, 123 aa, synthetic construct
  REGION 1..123: note = Description of Artificial Sequence: Synthetic polypeptide
QVTLKESGPALVKPTQTLTLTCTFSGFSLSTSGMCVSWIRQPPGKALEWLARIDWDDDKYYSTSLKTRLTISKDTSKNQVVLTMTNMDPVDTATYYCARMDIVGARGGWFDPWGQGTLVTVSS

SEQ ID NO: 771 - DNA, 30 bp, synthetic construct
  misc_feature 1..30: note = Description of Artificial Sequence: Synthetic oligonucleotide
  source 1..30: mol_type = other DNA
gggttctcactcagcactagtggaatgtgt

SEQ ID NO: 772 - protein, 10 aa, synthetic construct
  REGION 1..10: note = Description of Artificial Sequence: Synthetic peptide
GFSLSTSGMC

SEQ ID NO: 773 - DNA, 21 bp, synthetic construct
  misc_feature 1..21: note = Description of Artificial Sequence: Synthetic oligonucleotide
  source 1..21: mol_type = other DNA
attgattgggatgatgataaa

SEQ ID NO: 774 - protein, 7 aa, synthetic construct
  REGION 1..7: note = Description of Artificial Sequence: Synthetic peptide
IDWDDDK

SEQ ID NO: 775 - DNA, 45 bp, synthetic construct
  misc_feature 1..45: note = Description of Artificial Sequence: Synthetic oligonucleotide
  source 1..45: mol_type = other DNA
gcacggatggatatagtgggagctagaggggggtggttcgacccc

SEQ ID NO: 776 - protein, 15 aa, synthetic construct
  REGION 1..15: note = Description of Artificial Sequence: Synthetic peptide
ARMDIVGARGGWFDP

SEQ ID NO: 777 - DNA, 321 bp, synthetic construct
  misc_feature 1..321: note = Description of Artificial Sequence: Synthetic polynucleotide
  source 1..321: mol_type = other DNA
gacatccagatgacccagtctccatcctcactgtctgcatctgtaggagacagagtcaccatcacttgtcgggcgagtcagggcattagcaattatttagcctggtttcagcagaaaccagggaaagcccctaagtccctgatctatgctgcatccagtttgcaaagtggggtcccatcaaagttcagcggcagtggatctgggacagatttcactctcaccatcagcagcctgcagcctgaagattttgcaacttattactgccaacagtataatagttacccgctcactttcggcggagggaccaaggtggagatcaaa

SEQ ID NO: 778 - protein, 107 aa, synthetic construct
  REGION 1..107: note = Description of Artificial Sequence: Synthetic polypeptide
DIQMTQSPSSLSASVGDRVTITCRASQGISNYLAWFQQKPGKAPKSLIYAASSLQSGVPSKFSGSGSGTDFTLTISSLQPEDFATYYCQQYNSYPLTFGGGTKVEIK

SEQ ID NO: 779 - DNA, 18 bp, synthetic construct
  misc_feature 1..18: note = Description of Artificial Sequence: Synthetic oligonucleotide
  source 1..18: mol_type = other DNA
cagggcattagcaattat

SEQ ID NO: 780 - protein, 6 aa, synthetic construct
  REGION 1..6: note = Description of Artificial Sequence: Synthetic peptide
QGISNY

SEQ ID NO: 781-782 - skipped (2 entries)

SEQ ID NO: 783 - DNA, 27 bp, synthetic construct
  misc_feature 1..27: note = Description of Artificial Sequence: Synthetic oligonucleotide
  source 1..27: mol_type = other DNA
caacagtataatagttacccgctcact

SEQ ID NO: 784 - protein, 9 aa, synthetic construct
  REGION 1..9: note = Description of Artificial Sequence: Synthetic peptide
QQYNSYPLT

SEQ ID NO: 785 - DNA, 404 bp, synthetic construct
  misc_feature 1..404: note = Description of Artificial Sequence: Synthetic polynucleotide
  source 1..404: mol_type = other DNA
caggtgcagttggtggagtctgggggaggcgtggtccagcctgggaggtccctgagactctcctgtgctgcgtctggattcaccttcagaagttatggcatgcactgggtccgccaggctccaggcaaggggctggagtgggtggcaatgatatattatgatggaaataataaaaagtatgcagactccgtgaggggccgattcaccatttccagagacaattccaagaacacgctgtatctgcaaatgaacagcctgagagtcgaggacacggctgtgtatttctgtgcgcgagggcctgggtacaactggctcgacccctggggccagggaaccctggtcaccgtctcctcagccaaaacaacagccccacccgtttatccactggcccctggaagcttggg

SEQ ID NO: 786 - protein, 134 aa, synthetic construct
  REGION 1..134: note = Description of Artificial Sequence: Synthetic polypeptide
QVQLVESGGGVVQPGRSLRLSCAASGFTFRSYGMHWVRQAPGKGLEWVAMIYYDGNNKKYADSVRGRFTISRDNSKNTLYLQMNSLRVEDTAVYFCARGPGYNWLDPWGQGTLVTVSSAKTTAPPVYPLAPGSL

SEQ ID NO: 787 - DNA, 24 bp, synthetic construct
  misc_feature 1..24: note = Description of Artificial Sequence: Synthetic oligonucleotide
  source 1..24: mol_type = other DNA
ggattcaccttcagaagttatggc

SEQ ID NO: 788 - protein, 8 aa, synthetic construct
  REGION 1..8: note = Description of Artificial Sequence: Synthetic peptide
GFTFRSYG

SEQ ID NO: 789 - DNA, 24 bp, synthetic construct
  misc_feature 1..24: note = Description of Artificial Sequence: Synthetic oligonucleotide
  source 1..24: mol_type = other DNA
atatattatgatggaaataataaa

SEQ ID NO: 790 - protein, 8 aa, synthetic construct
  REGION 1..8: note = Description of Artificial Sequence: Synthetic peptide
IYYDGNNK

SEQ ID NO: 791 - DNA, 33 bp, synthetic construct; identical to SEQ ID NO: 551
  misc_feature 1..33: note = Description of Artificial Sequence: Synthetic oligonucleotide
  source 1..33: mol_type = other DNA

SEQ ID NO: 792 - protein, 11 aa, synthetic construct
  REGION 1..11: note = Description of Artificial Sequence: Synthetic peptide
ARGPGYNWLDP

SEQ ID NO: 793 - DNA, 321 bp, synthetic construct
  misc_feature 1..321: note = Description of Artificial Sequence: Synthetic polynucleotide
  source 1..321: mol_type = other DNA
gaaatagtgatgacgcagtctccagccaccctgtctgtgtctccaggggaaagagccaccctctcctgcagggccagtcagagtgttagcaggaacttggcctggtaccagcagaaacctggccaggctcccaggctcctcatctatggtgcatccaccagggccactgatatcccagccaggttcagtggcagtgggtctgggacagagttcattctcaacatcagcagcctgcagtctgaagattttgcactttattactgtcaacaatatagtaactggcctctcactttcggcggagggaccgaggtggagatcaaa

SEQ ID NO: 794 - protein, 107 aa, synthetic construct
  REGION 1..107: note = Description of Artificial Sequence: Synthetic polypeptide
EIVMTQSPATLSVSPGERATLSCRASQSVSRNLAWYQQKPGQAPRLLIYGASTRATDIPARFSGSGSGTEFILNISSLQSEDFALYYCQQYSNWPLTFGGGTEVEIK

SEQ ID NO: 795 - DNA, 18 bp, synthetic construct
  misc_feature 1..18: note = Description of Artificial Sequence: Synthetic oligonucleotide
  source 1..18: mol_type = other DNA
cagagtgttagcaggaac

SEQ ID NO: 796 - protein, 6 aa, synthetic construct
  REGION 1..6: note = Description of Artificial Sequence: Synthetic peptide
QSVSRN

SEQ ID NO: 797-798 - skipped (2 entries)

SEQ ID NO: 799 - DNA, 27 bp, synthetic construct
  misc_feature 1..27: note = Description of Artificial Sequence: Synthetic oligonucleotide
  source 1..27: mol_type = other DNA
caacaatatagtaactggcctctcact

SEQ ID NO: 800 - protein, 9 aa, synthetic construct
  REGION 1..9: note = Description of Artificial Sequence: Synthetic peptide
QQYSNWPLT

SEQ ID NO: 801 - DNA, 354 bp, synthetic construct; identical to SEQ ID NO: 689
  misc_feature 1..354: note = Description of Artificial Sequence: Synthetic polynucleotide
  source 1..354: mol_type = other DNA

SEQ ID NO: 802 - protein, 118 aa, synthetic construct; identical to SEQ ID NO: 610
  REGION 1..118: note = Description of Artificial Sequence: Synthetic polypeptide

SEQ ID NO: 803 - DNA, 24 bp, synthetic construct
  misc_feature 1..24: note = Description of Artificial Sequence: Synthetic oligonucleotide
  source 1..24: mol_type = other DNA
ggtttcaccttcagaagttttggc

SEQ ID NO: 804 - protein, 8 aa, synthetic construct
  REGION 1..8: note = Description of Artificial Sequence: Synthetic peptide
GFTFRSFG

SEQ ID NO: 805 - DNA, 24 bp, synthetic construct
  misc_feature 1..24: note = Description of Artificial Sequence: Synthetic oligonucleotide
  source 1..24: mol_type = other DNA
atatattttgatggaaaaaataaa

SEQ ID NO: 806 - protein, 8 aa, synthetic construct
  REGION 1..8: note = Description of Artificial Sequence: Synthetic peptide
IYFDGKNK

SEQ ID NO: 807 - DNA, 33 bp, synthetic construct; identical to SEQ ID NO: 551
  misc_feature 1..33: note = Description of Artificial Sequence: Synthetic oligonucleotide
  source 1..33: mol_type = other DNA

SEQ ID NO: 808 - protein, 11 aa, synthetic construct
  REGION 1..11: note = Description of Artificial Sequence: Synthetic peptide
ARGPGYNWLDP

SEQ ID NO: 809 - DNA, 321 bp, synthetic construct
  misc_feature 1..321: note = Description of Artificial Sequence: Synthetic polynucleotide
  source 1..321: mol_type = other DNA
gaaatagtgatgacgcagtctccagccaccctgtctgtgtctccaggggaaagagtcatcctctcctgtagggccagtcagagtattagcaggaacttggcctggtaccagcagaaacctggccaggctcccaggctcctcatctatggtgcaaccaccagggccactggtgtcccagccaggttcagtggcagtgggtctgggacagagttcactctcaccatcagcagcctacagtctgaagattttgcagttttttactgtcagcagtataataataggcctctcactttcggcggagggaccgaggtggagatcaaa

SEQ ID NO: 810 - protein, 107 aa, synthetic construct; identical to SEQ ID NO: 698
  REGION 1..107: note = Description of Artificial Sequence: Synthetic polypeptide

SEQ ID NO: 811 - DNA, 18 bp, synthetic construct
  misc_feature 1..18: note = Description of Artificial Sequence: Synthetic oligonucleotide
  source 1..18: mol_type = other DNA
cagagtattagcaggaac

SEQ ID NO: 812 - protein, 6 aa, synthetic construct
  REGION 1..6: note = Description of Artificial Sequence: Synthetic peptide
QSISRN

SEQ ID NO: 813-814 - skipped (2 entries)

SEQ ID NO: 815 - DNA, 27 bp, synthetic construct
  misc_feature 1..27: note = Description of Artificial Sequence: Synthetic oligonucleotide
  source 1..27: mol_type = other DNA
cagcagtataataataggcctctcact

SEQ ID NO: 816 - protein, 9 aa, synthetic construct
  REGION 1..9: note = Description of Artificial Sequence: Synthetic peptide
QQYNNRPLT

SEQ ID NO: 817 - DNA, 354 bp, synthetic construct; identical to SEQ ID NO: 689
  misc_feature 1..354: note = Description of Artificial Sequence: Synthetic polynucleotide
  source 1..354: mol_type = other DNA

SEQ ID NO: 818 - protein, 118 aa, synthetic construct; identical to SEQ ID NO: 610
  REGION 1..118: note = Description of Artificial Sequence: Synthetic polypeptide

SEQ ID NO: 819 - DNA, 24 bp, synthetic construct
  misc_feature 1..24: note = Description of Artificial Sequence: Synthetic oligonucleotide
  source 1..24: mol_type = other DNA
ggtttcaccttcagaagttttggc

SEQ ID NO: 820 - protein, 8 aa, synthetic construct
  REGION 1..8: note = Description of Artificial Sequence: Synthetic peptide
GFTFRSFG

SEQ ID NO: 821 - DNA, 24 bp, synthetic construct
  misc_feature 1..24: note = Description of Artificial Sequence: Synthetic oligonucleotide
  source 1..24: mol_type = other DNA
atatattttgatggaaaaaataaa

SEQ ID NO: 822 - protein, 8 aa, synthetic construct
  REGION 1..8: note = Description of Artificial Sequence: Synthetic peptide
IYFDGKNK

SEQ ID NO: 823 - DNA, 33 bp, synthetic construct; identical to SEQ ID NO: 551
  misc_feature 1..33: note = Description of Artificial Sequence: Synthetic oligonucleotide
  source 1..33: mol_type = other DNA

SEQ ID NO: 824 - protein, 11 aa, synthetic construct
  REGION 1..11: note = Description of Artificial Sequence: Synthetic peptide
ARGPGYNWLDP

SEQ ID NO: 825 - DNA, 321 bp, synthetic construct; identical to SEQ ID NO: 809
  misc_feature 1..321: note = Description of Artificial Sequence: Synthetic polynucleotide
  source 1..321: mol_type = other DNA

SEQ ID NO: 826 - protein, 107 aa, synthetic construct; identical to SEQ ID NO: 698
  REGION 1..107: note = Description of Artificial Sequence: Synthetic polypeptide

SEQ ID NO: 827 - DNA, 18 bp, synthetic construct
  misc_feature 1..18: note = Description of Artificial Sequence: Synthetic oligonucleotide
  source 1..18: mol_type = other DNA
cagagtattagcaggaac

SEQ ID NO: 828 - protein, 6 aa, synthetic construct
  REGION 1..6: note = Description of Artificial Sequence: Synthetic peptide
QSISRN

SEQ ID NO: 829-830 - skipped (2 entries)

SEQ ID NO: 831 - DNA, 27 bp, synthetic construct
  misc_feature 1..27: note = Description of Artificial Sequence: Synthetic oligonucleotide
  source 1..27: mol_type = other DNA
cagcagtataataataggcctctcact

SEQ ID NO: 832 - protein, 9 aa, synthetic construct
  REGION 1..9: note = Description of Artificial Sequence: Synthetic peptide
QQYNNRPLT

SEQ ID NO: 833 - DNA, 351 bp, synthetic construct
  misc_feature 1..351: note = Description of Artificial Sequence: Synthetic polynucleotide
  source 1..351: mol_type = other DNA
caggtgcacctggaagagtctgggggaggcgtggtccagcctgggaggtccctgagactctcctgttcagcgtctggtttcaccttcagtagttatgccatgcactgggtccgccaggctccaggcaaggggctggagtgggtggcagttatatggtatgatggaactaataaatattatttagattccgtgaagggccgattcaccatctccagagacaattccaagaacacgctgtttctgcaaatgaacagcctgagagccgaagacacggctgtgtattactgtgcgagagatcggggaagtataataacccactggggccagggaaccctggtcaccgtctcctca

SEQ ID NO: 834 - protein, 117 aa, synthetic construct
  REGION 1..117: note = Description of Artificial Sequence: Synthetic polypeptide
QVHLEESGGGVVQPGRSLRLSCSASGFTFSSYAMHWVRQAPGKGLEWVAVIWYDGTNKYYLDSVKGRFTISRDNSKNTLFLQMNSLRAEDTAVYYCARDRGSIITHWGQGTLVTVSS

SEQ ID NO: 835 - DNA, 24 bp, synthetic construct
  misc_feature 1..24: note = Description of Artificial Sequence: Synthetic oligonucleotide
  source 1..24: mol_type = other DNA
ggtttcaccttcagtagttatgcc

SEQ ID NO: 836 - protein, 8 aa, synthetic construct
  REGION 1..8: note = Description of Artificial Sequence: Synthetic peptide
GFTFSSYA

SEQ ID NO: 837 - DNA, 24 bp, synthetic construct
  misc_feature 1..24: note = Description of Artificial Sequence: Synthetic oligonucleotide
  source 1..24: mol_type = other DNA
atatggtatgatggaactaataaa

SEQ ID NO: 838 - protein, 8 aa, synthetic construct
  REGION 1..8: note = Description of Artificial Sequence: Synthetic peptide
IWYDGTNK

SEQ ID NO: 839 - DNA, 30 bp, synthetic construct
  misc_feature 1..30: note = Description of Artificial Sequence: Synthetic oligonucleotide
  source 1..30: mol_type = other DNA
gcgagagatcggggaagtataataacccac

SEQ ID NO: 840 - protein, 10 aa, synthetic construct
  REGION 1..10: note = Description of Artificial Sequence: Synthetic peptide
ARDRGSIITH

SEQ ID NO: 841 - DNA, 324 bp, synthetic construct
  misc_feature 1..324: note = Description of Artificial Sequence: Synthetic polynucleotide
  source 1..324: mol_type = other DNA
gacatccagatgacccagtctccatcctccctgtctgcatctataggagacagagtcaccatcacttgccgggcaagtcagaacattagcagctatttaaattggtatcagcagaaaccagggaaagcccctaagctcctgatctatgctgcatccagtttgcaaagtggggtcccatcaaggttcagtggcagtggatctgggacagatttcactctcaccatcagcagtctgcaacctgaagattttgcaacttactactgtcaacagacttacagtacccctccgatcaccttcggccaagggacacgactggagattaaa

SEQ ID NO: 842 - protein, 108 aa, synthetic construct
  REGION 1..108: note = Description of Artificial Sequence: Synthetic polypeptide
DIQMTQSPSSLSASIGDRVTITCRASQNISSYLNWYQQKPGKAPKLLIYAASSLQSGVPSRFSGSGSGTDFTLTISSLQPEDFATYYCQQTYSTPPITFGQGTRLEIK

SEQ ID NO: 843 - DNA, 18 bp, synthetic construct
  misc_feature 1..18: note = Description of Artificial Sequence: Synthetic oligonucleotide
  source 1..18: mol_type = other DNA
cagaacattagcagctat

SEQ ID NO: 844 - protein, 6 aa, synthetic construct
  REGION 1..6: note = Description of Artificial Sequence: Synthetic peptide
QNISSY

SEQ ID NO: 845-846 - skipped (2 entries)

SEQ ID NO: 847 - DNA, 30 bp, synthetic construct
  misc_feature 1..30: note = Description of Artificial Sequence: Synthetic oligonucleotide
  source 1..30: mol_type = other DNA
caacagacttacagtacccctccgatcacc

SEQ ID NO: 848 - protein, 10 aa, synthetic construct
  REGION 1..10: note = Description of Artificial Sequence: Synthetic peptide
QQTYSTPPIT

SEQ ID NO: 849 - DNA, 372 bp, synthetic construct
  misc_feature 1..372: note = Description of Artificial Sequence: Synthetic polynucleotide
  source 1..372: mol_type = other DNA
gaagtacagctggtggagtctgggggaggcttggtacggcctggcaggtccctgagactctcctgtgcagcctctggattcacctttgatgattataccatgcactgggtccgccaagctccagggaagggcctggagtgggtctcagatattagttggaatagtgggaccataggctatgcggactctgtgaagggccgattcaccatctccagagacaacgccaagaactccctgtatctgcaaatgaacagtctgagacctgaggacacggccttgtattactgtgcaaaagatatgagtggctacgcccactactactactacggtatggacgtctggggccaagggaccacggtcaccgtctcctca

SEQ ID NO: 850 - protein, 124 aa, synthetic construct
  REGION 1..124: note = Description of Artificial Sequence: Synthetic polypeptide
EVQLVESGGGLVRPGRSLRLSCAASGFTFDDYTMHWVRQAPGKGLEWVSDISWNSGTIGYADSVKGRFTISRDNAKNSLYLQMNSLRPEDTALYYCAKDMSGYAHYYYYGMDVWGQGTTVTVSS

SEQ ID NO: 851 - DNA, 24 bp, synthetic construct
  misc_feature 1..24: note = Description of Artificial Sequence: Synthetic oligonucleotide
  source 1..24: mol_type = other DNA
ggattcacctttgatgattatacc

SEQ ID NO: 852 - protein, 8 aa, synthetic construct
  REGION 1..8: note = Description of Artificial Sequence: Synthetic peptide
GFTFDDYT

SEQ ID NO: 853 - DNA, 24 bp, synthetic construct
  misc_feature 1..24: note = Description of Artificial Sequence: Synthetic oligonucleotide
  source 1..24: mol_type = other DNA
attagttggaatagtgggaccata

SEQ ID NO: 854 - protein, 8 aa, synthetic construct
  REGION 1..8: note = Description of Artificial Sequence: Synthetic peptide
ISWNSGTI

SEQ ID NO: 855 - DNA, 51 bp, synthetic construct
  misc_feature 1..51: note = Description of Artificial Sequence: Synthetic oligonucleotide
  source 1..51: mol_type = other DNA
gcaaaagatatgagtggctacgcccactactactactacggtatggacgtc

SEQ ID NO: 856 - protein, 17 aa, synthetic construct
  REGION 1..17: note = Description of Artificial Sequence: Synthetic peptide
AKDMSGYAHYYYYGMDV

SEQ ID NO: 857 - DNA, 324 bp, synthetic construct
  misc_feature 1..324: note = Description of Artificial Sequence: Synthetic polynucleotide
  source 1..324: mol_type = other DNA
gacatccagatgacccagtctccatcctccctgtctgcatctgtaggagacagagtcaccatcacttgccgggcaagtcagagcattagcagctatttaaattggtatcagcagaaaccagggaaagcccctaagctcctgatctatgctgcatccagtttgcaaagtggggtcccatcaaggttcagtggcagtggatctgggacagatttcactctcaccatcagcagtctgcaacctgaagattttgcaacttactactgtcaacagagttacagtacccctccgatcaccttcggccaagggacacgactggagattaaa

SEQ ID NO: 858 - protein, 108 aa, synthetic construct; identical to SEQ ID NO: 58
  REGION 1..108: note = Description of Artificial Sequence: Synthetic polypeptide

SEQ ID NO: 859 - DNA, 18 bp, synthetic construct
  misc_feature 1..18: note = Description of Artificial Sequence: Synthetic oligonucleotide
  source 1..18: mol_type = other DNA
cagagcattagcagctat

SEQ ID NO: 860 - protein, 6 aa, synthetic construct
  REGION 1..6: note = Description of Artificial Sequence: Synthetic peptide
QSISSY

SEQ ID NO: 861-862 - skipped (2 entries)

SEQ ID NO: 863 - DNA, 30 bp, synthetic construct; identical to SEQ ID NO: 15
  misc_feature 1..30: note = Description of Artificial Sequence: Synthetic oligonucleotide
  source 1..30: mol_type = other DNA

SEQ ID NO: 864 - protein, 10 aa, synthetic construct
  REGION 1..10: note = Description of Artificial Sequence: Synthetic peptide
QQSYSTPPIT

SEQ ID NO: 865 - DNA, 372 bp, synthetic construct
  misc_feature 1..372: note = Description of Artificial Sequence: Synthetic polynucleotide
  source 1..372: mol_type = other DNA
gaagtgcagctggtggagtctgggggaggcttggtacagcctggcaggtccctgagactctcctgtgcagcctctggattcacctttgatgattataccatgcactgggtccggcaagctccagggaagggcctggagtgggtctccgatattagttggaatagtggtagcataggctatgcggactctgtgaagggccgattcaccgtctccagagacaacgccaagaactccctgtatctgcaaatgaacagtctgagaggtgaggacacggccctgtattactgtgcaaaagatatgagtggctacgcccactacggctactacggtatggacgtctggggccaagggaccacggtcaccgtctcctca

SEQ ID NO: 866 - protein, 124 aa, synthetic construct
  REGION 1..124: note = Description of Artificial Sequence: Synthetic polypeptide
EVQLVESGGGLVQPGRSLRLSCAASGFTFDDYTMHWVRQAPGKGLEWVSDISWNSGSIGYADSVKGRFTVSRDNAKNSLYLQMNSLRGEDTALYYCAKDMSGYAHYGYYGMDVWGQGTTVTVSS

SEQ ID NO: 867 - DNA, 24 bp, synthetic construct
  misc_feature 1..24: note = Description of Artificial Sequence: Synthetic oligonucleotide
  source 1..24: mol_type = other DNA
ggattcacctttgatgattatacc

SEQ ID NO: 868 - protein, 8 aa, synthetic construct
  REGION 1..8: note = Description of Artificial Sequence: Synthetic peptide
GFTFDDYT

SEQ ID NO: 869 - DNA, 24 bp, synthetic construct
  misc_feature 1..24: note = Description of Artificial Sequence: Synthetic oligonucleotide
  source 1..24: mol_type = other DNA
attagttggaatagtggtagcata

SEQ ID NO: 870 - protein, 8 aa, synthetic construct
  REGION 1..8: note = Description of Artificial Sequence: Synthetic peptide
ISWNSGSI

SEQ ID NO: 871 - DNA, 51 bp, synthetic construct
  misc_feature 1..51: note = Description of Artificial Sequence: Synthetic oligonucleotide
  source 1..51: mol_type = other DNA
gcaaaagatatgagtggctacgcccactacggctactacggtatggacgtc

SEQ ID NO: 872 - protein, 17 aa, synthetic construct
  REGION 1..17: note = Description of Artificial Sequence: Synthetic peptide
AKDMSGYAHYGYYGMDV

SEQ ID NO: 873 - DNA, 324 bp, synthetic construct
  misc_feature 1..324: note = Description of Artificial Sequence: Synthetic polynucleotide
  source 1..324: mol_type = other DNA
gacatccagatgacccagtctccatcctccctgtctgcatctgtaggagacagagtcaccatcacttgccgggcaagtcagagcattaggaactatttaaattggtatcagcagaaaccagggaaagtccctaagctcctgatctatgctgcatccagtttgcaaagtggggtcccatcaaggttcagtggcagtggatctgggacagatttcactctcaccatcagcagtctgcaacctgaagattttgcaacttactactgtcaacagagttacagtaaccctccgatcaccttcggccaagggacacgactggagattaaa

SEQ ID NO: 874 - protein, 108 aa, synthetic construct
  REGION 1..108: note = Description of Artificial Sequence: Synthetic polypeptide
DIQMTQSPSSLSASVGDRVTITCRASQSIRNYLNWYQQKPGKVPKLLIYAASSLQSGVPSRFSGSGSGTDFTLTISSLQPEDFATYYCQQSYSNPPITFGQGTRLEIK

SEQ ID NO: 875 - DNA, 18 bp, synthetic construct
  misc_feature 1..18: note = Description of Artificial Sequence: Synthetic oligonucleotide
  source 1..18: mol_type = other DNA
cagagcattaggaactat

SEQ ID NO: 876 - protein, 6 aa, synthetic construct
  REGION 1..6: note = Description of Artificial Sequence: Synthetic peptide
QSIRNY

SEQ ID NO: 877-878 - skipped (2 entries)

SEQ ID NO: 879 - DNA, 30 bp, synthetic construct
  misc_feature 1..30: note = Description of Artificial Sequence: Synthetic oligonucleotide
  source 1..30: mol_type = other DNA
caacagagttacagtaaccctccgatcacc

SEQ ID NO: 880 - protein, 10 aa, synthetic construct
  REGION 1..10: note = Description of Artificial Sequence: Synthetic peptide
QQSYSNPPIT

SEQ ID NO: 881 - DNA, 369 bp, synthetic construct
  misc_feature 1..369: note = Description of Artificial Sequence: Synthetic polynucleotide
  source 1..369: mol_type = other DNA
gaagcgcagctggtggaatctgggggaggcttggtacagcctggcaggtccctgagactctcctgtacaacctctggattcacctttgatgattataccatgcactgggtccggcaagctccagggaagggcctggagtggatctctgatattagttggaatggtggaaccaaaggctatgcggactctgtgaagggccgattcaccatctccagagacaacgccaaaaactccctgtatctgcaaatggacagtctgagaggtgaggacacggccttatattactgtgtaaaagataaaagtggctacgggcacttctacttcggtttggacgtctggggccaagggaccacggtcaccgtctcctca

SEQ ID NO: 882 - protein, 123 aa, synthetic construct
  REGION 1..123: note = Description of Artificial Sequence: Synthetic polypeptide
EAQLVESGGGLVQPGRSLRLSCTTSGFTFDDYTMHWVRQAPGKGLEWISDISWNGGTKGYADSVKGRFTISRDNAKNSLYLQMDSLRGEDTALYYCVKDKSGYGHFYFGLDVWGQGTTVTVSS

SEQ ID NO: 883 - DNA, 24 bp, synthetic construct
  misc_feature 1..24: note = Description of Artificial Sequence: Synthetic oligonucleotide
  source 1..24: mol_type = other DNA
ggattcacctttgatgattatacc

SEQ ID NO: 884 - protein, 8 aa, synthetic construct
  REGION 1..8: note = Description of Artificial Sequence: Synthetic peptide
GFTFDDYT

SEQ ID NO: 885 - DNA, 24 bp, synthetic construct
  misc_feature 1..24: note = Description of Artificial Sequence: Synthetic oligonucleotide
  source 1..24: mol_type = other DNA
attagttggaatggtggaaccaaa

SEQ ID NO: 886 - protein, 8 aa, synthetic construct
  REGION 1..8: note = Description of Artificial Sequence: Synthetic peptide
ISWNGGTK

SEQ ID NO: 887 - DNA, 48 bp, synthetic construct
  misc_feature 1..48: note = Description of Artificial Sequence: Synthetic oligonucleotide
  source 1..48: mol_type = other DNA
gtaaaagataaaagtggctacgggcacttctacttcggtttggacgtc

SEQ ID NO: 888 - protein, 16 aa, synthetic construct
  REGION 1..16: note = Description of Artificial Sequence: Synthetic peptide
VKDKSGYGHFYFGLDV

SEQ ID NO: 889 - DNA, 324 bp, synthetic construct
  misc_feature 1..324: note = Description of Artificial Sequence: Synthetic polynucleotide
  source 1..324: mol_type = other DNA
gacatccagatgacccagtctccatcctccctgactgcgtctgtaggagacagagtcaccttcacttgccgggcaagtcagagcattagcaggcatttaagttggtatcagcagaaaccagggaaagcccctaagctcctgatctatgctgcatccagtttggaaagtggggtcccttcaaggttcagtggcagtggatctgggacagatttcactctcaccatcagcagtctgcaccctgaagattttgcaacttactactgtcaacagagctacagtaaccctccgatcaccttcggccaagggacacgactggagattaaa

SEQ ID NO: 890 - protein, 108 aa, synthetic construct
  REGION 1..108: note = Description of Artificial Sequence: Synthetic polypeptide
DIQMTQSPSSLTASVGDRVTFTCRASQSISRHLSWYQQKPGKAPKLLIYAASSLESGVPSRFSGSGSGTDFTLTISSLHPEDFATYYCQQSYSNPPITFGQGTRLEIK

SEQ ID NO: 891 - DNA, 18 bp, synthetic construct
  misc_feature 1..18: note = Description of Artificial Sequence: Synthetic oligonucleotide
  source 1..18: mol_type = other DNA
cagagcattagcaggcat

SEQ ID NO: 892 - protein, 6 aa, synthetic construct
  REGION 1..6: note = Description of Artificial Sequence: Synthetic peptide
QSISRH

SEQ ID NO: 893-894 - skipped (2 entries)

SEQ ID NO: 895 - DNA, 30 bp, synthetic construct
  misc_feature 1..30: note = Description of Artificial Sequence: Synthetic oligonucleotide
  source 1..30: mol_type = other DNA
caacagagctacagtaaccctccgatcacc

SEQ ID NO: 896 - protein, 10 aa, synthetic construct
  REGION 1..10: note = Description of Artificial Sequence: Synthetic peptide
QQSYSNPPIT

SEQ ID NO: 897 - DNA, 369 bp, synthetic construct
  misc_feature 1..369: note = Description of Artificial Sequence: Synthetic polynucleotide
  source 1..369: mol_type = other DNA
gaagtgcagttggtggagtctgggggaggcttggtacagcctggcaggtccctgagactctcctgtgcagcctctggattcaagtttgctgattatgccatgcactgggtccggcaagctccagggaagggcctggagtgggtctcagagattagttggaatagtggtagcataggttatgtggactctgtgaagggccgattcaccatctccagagacaacgccaagaactccctgtatctgcaaatgaacagtctgagagctgaggacacggccttgtattactgtgtaaaagataaaagtggctacgggcactactatatcggtatggacgtctggggccaagggaccacggtcatcgtctcctcc

SEQ ID NO: 898 - protein, 123 aa, synthetic construct
  REGION 1..123: note = Description of Artificial Sequence: Synthetic polypeptide
EVQLVESGGGLVQPGRSLRLSCAASGFKFADYAMHWVRQAPGKGLEWVSEISWNSGSIGYVDSVKGRFTISRDNAKNSLYLQMNSLRAEDTALYYCVKDKSGYGHYYIGMDVWGQGTTVIVSS

SEQ ID NO: 899 - DNA, 24 bp, synthetic construct
  misc_feature 1..24: note = Description of Artificial Sequence: Synthetic oligonucleotide
  source 1..24: mol_type = other DNA
ggattcaagtttgctgattatgcc

SEQ ID NO: 900 - protein, 8 aa, synthetic construct
  REGION 1..8: note = Description of Artificial Sequence: Synthetic peptide
GFKFADYA

SEQ ID NO: 901 - DNA, 24 bp, synthetic construct
  misc_feature 1..24: note = Description of Artificial Sequence: Synthetic oligonucleotide
  source 1..24: mol_type = other DNA
attagttggaatagtggtagcata

SEQ ID NO: 902 - protein, 8 aa, synthetic construct
  REGION 1..8: note = Description of Artificial Sequence: Synthetic peptide
ISWNSGSI

SEQ ID NO: 903 - DNA, 48 bp, synthetic construct
  misc_feature 1..48: note = Description of Artificial Sequence: Synthetic oligonucleotide
  source 1..48: mol_type = other DNA
gtaaaagataaaagtggctacgggcactactatatcggtatggacgtc

SEQ ID NO: 904 - protein, 16 aa, synthetic construct
  REGION 1..16: note = Description of Artificial Sequence: Synthetic peptide
VKDKSGYGHYYIGMDV

SEQ ID NO: 905 - DNA, 324 bp, synthetic construct
  misc_feature 1..324: note = Description of Artificial Sequence: Synthetic polynucleotide
  source 1..324: mol_type = other DNA
gacatccagatgacccagtctccatcctccctgtctgcatctgtaggagacagagtcaccatcacttgccgggcaagtcagagtattagcagctatttaaattggtatcagcagaaaccagggaaagcccctaagctcctgatctatgctgcatccagtttgcaaagtggggtcccatcaaggttcagtggcagtggatctgggacagatttcactctcaccatcagcagtctgcaacctgaagattttgcaacttactactgtcaacagagttacagtacccctccgatcaccttcggccaagggacacgactggagattaaa

SEQ ID NO: 906 - protein, 108 aa, synthetic construct; identical to SEQ ID NO: 58
  REGION 1..108: note = Description of Artificial Sequence: Synthetic polypeptide

SEQ ID NO: 907 - DNA, 18 bp, synthetic construct
  misc_feature 1..18: note = Description of Artificial Sequence: Synthetic oligonucleotide
  source 1..18: mol_type = other DNA
cagagtattagcagctat

SEQ ID NO: 908 - protein, 6 aa, synthetic construct
  REGION 1..6: note = Description of Artificial Sequence: Synthetic peptide
QSISSY

SEQ ID NO: 909-910 - skipped (2 entries)

SEQ ID NO: 911 - DNA, 30 bp, synthetic construct; identical to SEQ ID NO: 15
  misc_feature 1..30: note = Description of Artificial Sequence: Synthetic oligonucleotide
  source 1..30: mol_type = other DNA

SEQ ID NO: 912 - protein, 10 aa, synthetic construct
  REGION 1..10: note = Description of Artificial Sequence: Synthetic peptide
QQSYSTPPIT

SEQ ID NO: 913 - DNA, 372 bp, synthetic construct
  misc_feature 1..372: note = Description of Artificial Sequence: Synthetic polynucleotide
  source 1..372: mol_type = other DNA
gaagtgcacctggtggagtctgggggaggcttggtacagcctggcaggtccctgagactctcctgtgcagcctctggattcacctttgatgattataccatgcactgggtccggcaagctccagggaagggcctggagtgggtctccgatattagttggaatagtggtagcataggctatgcggactctgtgaagggccgattcaccgtctccagagacaacgccaagaactccctgtatctgcaaatgaacagtctgagaggtgaggacacggccttgtattactgtgcaaaagatatgagtggctacggccactacggcaagtacggtatggacgtctggggccaagggaccacggtcaccgtctcctca

SEQ ID NO: 914 - protein, 124 aa, synthetic construct
  REGION 1..124: note = Description of Artificial Sequence: Synthetic polypeptide
EVHLVESGGGLVQPGRSLRLSCAASGFTFDDYTMHWVRQAPGKGLEWVSDISWNSGSIGYADSVKGRFTVSRDNAKNSLYLQMNSLRGEDTALYYCAKDMSGYGHYGKYGMDVWGQGTTVTVSS

SEQ ID NO: 915 - DNA, 24 bp, synthetic construct
  misc_feature 1..24: note = Description of Artificial Sequence: Synthetic oligonucleotide
  source 1..24: mol_type = other DNA
ggattcacctttgatgattatacc

SEQ ID NO: 916 - protein, 8 aa, synthetic construct
  REGION 1..8: note = Description of Artificial Sequence: Synthetic peptide
GFTFDDYT

SEQ ID NO: 917 - DNA, 24 bp, synthetic construct
  misc_feature 1..24: note = Description of Artificial Sequence: Synthetic oligonucleotide
  source 1..24: mol_type = other DNA
attagttggaatagtggtagcata

SEQ ID NO: 918 - protein, 8 aa, synthetic construct
  REGION 1..8: note = Description of Artificial Sequence: Synthetic peptide
ISWNSGSI

SEQ ID NO: 919 - DNA, 51 bp, synthetic construct
  misc_feature 1..51: note = Description of Artificial Sequence: Synthetic oligonucleotide
  source 1..51: mol_type = other DNA
gcaaaagatatgagtggctacggccactacggcaagtacggtatggacgtc

SEQ ID NO: 920 - protein, 17 aa, synthetic construct
  REGION 1..17: note = Description of Artificial Sequence: Synthetic peptide
AKDMSGYGHYGKYGMDV

SEQ ID NO: 921 - DNA, 324 bp, synthetic construct
  misc_feature 1..324: note = Description of Artificial Sequence: Synthetic polynucleotide
  source 1..324: mol_type = other DNA
gacatccagatgacccagtctccatcctccctgtctgcatctgtaggagacagagtcaccatcacttgccgggcaagtcagagcattaggagctatttaaattggtatcagcagaaaccagggaaagtccctaagctcctgatctatgctgcatccagtttgcaaagtggggtcccatcaaggttcagtggcagtggatctgggacagatttcactctcaccatcaacagtctgcaacctgacgattttgcaacttactactgtcaacagacttacagtaaccctccgatcaccttcggccaagggacacgactggagattaaa

SEQ ID NO: 922 - protein, 108 aa, synthetic construct
  REGION 1..108: note = Description of Artificial Sequence: Synthetic polypeptide
DIQMTQSPSSLSASVGDRVTITCRASQSIRSYLNWYQQKPGKVPKLLIYAASSLQSGVPSRFSGSGSGTDFTLTINSLQPDDFATYYCQQTYSNPPITFGQGTRLEIK

SEQ ID NO: 923 - DNA, 18 bp, synthetic construct
  misc_feature 1..18: note = Description of Artificial Sequence: Synthetic oligonucleotide
  source 1..18: mol_type = other DNA
cagagcattaggagctat

SEQ ID NO: 924 - protein, 6 aa, synthetic construct
  REGION 1..6: note = Description of Artificial Sequence: Synthetic peptide
QSIRSY

SEQ ID NO: 925-926 - skipped (2 entries)

SEQ ID NO: 927 - DNA, 30 bp, synthetic construct
  misc_feature 1..30: note = Description of Artificial Sequence: Synthetic oligonucleotide
  source 1..30: mol_type = other DNA
caacagacttacagtaaccctccgatcacc

SEQ ID NO: 928 - protein, 10 aa, synthetic construct
  REGION 1..10: note = Description of Artificial Sequence: Synthetic peptide
QQTYSNPPIT

SEQ ID NO: 929 - DNA, 372 bp, synthetic construct
  misc_feature 1..372: note = Description of Artificial Sequence: Synthetic polynucleotide
  source 1..372: mol_type = other DNA
gaggtgcagctggtggagtctgggggagacttggtacagcctggcaggtccctgagactctcctgtgcagcctctggattcacctttgatgattataccatgcactgggtccggcaagctccagggaagggcctggagtgggtctcaattattagttggaatggtaataccattgactatgcggactctgtgaagggccgattcaccatctccagagacaacgccaagaactccctgtatcttcaaatgaacagtctgagagctgaggacacggccttgtattactgtgcaaaagataagagtggctacggacacttctactattacgttttggacgtctggggccaagggaccacggtcaccgtctcctca

SEQ ID NO: 930 - protein, 124 aa, synthetic construct
  REGION 1..124: note = Description of Artificial Sequence: Synthetic polypeptide
EVQLVESGGDLVQPGRSLRLSCAASGFTFDDYTMHWVRQAPGKGLEWVSIISWNGNTIDYADSVKGRFTISRDNAKNSLYLQMNSLRAEDTALYYCAKDKSGYGHFYYYVLDVWGQGTTVTVSS

SEQ ID NO: 931 - DNA, 24 bp, synthetic construct
  misc_feature 1..24: note = Description of Artificial Sequence: Synthetic oligonucleotide
  source 1..24: mol_type = other DNA
ggattcacctttgatgattatacc

SEQ ID NO: 932 - protein, 8 aa, synthetic construct
  REGION 1..8: note = Description of Artificial Sequence: Synthetic peptide
GFTFDDYT

SEQ ID NO: 933 - DNA, 24 bp, synthetic construct
  misc_feature 1..24: note = Description of Artificial Sequence: Synthetic oligonucleotide
  source 1..24: mol_type = other DNA
attagttggaatggtaataccatt

SEQ ID NO: 934 - protein, 8 aa, synthetic construct
  REGION 1..8: note = Description of Artificial Sequence: Synthetic peptide
ISWNGNTI

SEQ ID NO: 935 - DNA, 51 bp, synthetic construct
  misc_feature 1..51: note = Description of Artificial Sequence: Synthetic oligonucleotide
  source 1..51: mol_type = other DNA
gcaaaagataagagtggctacggacacttctactattacgttttggacgtc

SEQ ID NO: 936 - protein, 17 aa, synthetic construct
  REGION 1..17: note = Description of Artificial Sequence: Synthetic peptide
AKDKSGYGHFYYYVLDV

SEQ ID NO: 937 - DNA, 321 bp, synthetic construct
  misc_feature 1..321: note = Description of Artificial Sequence: Synthetic polynucleotide
  source 1..321: mol_type = other DNA
gacatccagatgacccagtctccatcctccctgtctgcatctgtaggagacagagtcaccatcacttgccgggcaagtcagagcattaacaactatttaaattggtatcagcagaaaccagggaaagcccctaaactcctgatctatgctgcttccagtttgcaaagtggggtcccgtcaaggttcagtggcagtggttctgggacagatttcactctcaccatcagcagtctgcaacctgaagattttgcaacttactactctcaacagagttacagtttcccgtggacgttcggccaagggaccaaggtggaaatcaaa

SEQ ID NO: 938 - protein, 107 aa, synthetic construct
  REGION 1..107: note = Description of Artificial Sequence: Synthetic polypeptide
DIQMTQSPSSLSASVGDRVTITCRASQSINNYLNWYQQKPGKAPKLLIYAASSLQSGVPSRFSGSGSGTDFTLTISSLQPEDFATYYSQQSYSFPWTFGQGTKVEIK

SEQ ID NO: 939 - DNA, 18 bp, synthetic construct
  misc_feature 1..18: note = Description of Artificial Sequence: Synthetic oligonucleotide
  source 1..18: mol_type = other DNA
cagagcattaacaactat

SEQ ID NO: 940 - protein, 6 aa, synthetic construct
  REGION 1..6: note = Description of Artificial Sequence: Synthetic peptide
QSINNY

SEQ ID NO: 941-942 - skipped (2 entries)

SEQ ID NO: 943 - DNA, 27 bp, synthetic construct
  misc_feature 1..27: note = Description of Artificial Sequence: Synthetic oligonucleotide
  source 1..27: mol_type = other DNA
caacagagttacagtttcccgtggacg

SEQ ID NO: 944 - protein, 9 aa, synthetic construct
  REGION 1..9: note = Description of Artificial Sequence: Synthetic peptide
QQSYSFPWT

SEQ ID NO: 945 - DNA, 363 bp, synthetic construct
  misc_feature 1..363: note = Description of Artificial Sequence: Synthetic polynucleotide
  source 1..363: mol_type = other DNA
caggtgcagctggtggagtcggggggaggcgtggtccagcctgggaggtccctgagaccctcctgtgcagcgtctggatttagtttcagggactatggcatgcactgggtccgccaggctccaggtaagggactagagtggatggcacacatatggtataatggaaagaataaatattatgcagactccgtgaagggccgattcaccatctccagagacaattccaagaacacgctatatctgcaaatgaacagcctgagacccgaggacacggctgtatattattgtgcgagagatggtgtatcagcacgtggtactccatttgactactggggccagggaaccctggtcaccgtctcctca

SEQ ID NO: 946 - protein, 121 aa, synthetic construct
  REGION 1..121: note = Description of Artificial Sequence: Synthetic polypeptide
QVQLVESGGGVVQPGRSLRPSCAASGFSFRDYGMHWVRQAPGKGLEWMAHIWYNGKNKYYADSVKGRFTISRDNSKNTLYLQMNSLRPEDTAVYYCARDGVSARGTPFDYWGQGTLVTVSS

SEQ ID NO: 947 - DNA, 24 bp, synthetic construct
  misc_feature 1..24: note = Description of Artificial Sequence: Synthetic oligonucleotide
  source 1..24: mol_type = other DNA
ggatttagtttcagggactatggc

SEQ ID NO: 948 - protein, 8 aa, synthetic construct
  REGION 1..8: note = Description of Artificial Sequence: Synthetic peptide
GFSFRDYG

SEQ ID NO: 949 - DNA, 24 bp, synthetic construct
  misc_feature 1..24: note = Description of Artificial Sequence: Synthetic oligonucleotide
  source 1..24: mol_type = other DNA
atatggtataatggaaagaataaa

SEQ ID NO: 950 - protein, 8 aa, synthetic construct
  REGION 1..8: note = Description of Artificial Sequence: Synthetic peptide
IWYNGKNK

SEQ ID NO: 951 - DNA, 42 bp, synthetic construct
  misc_feature 1..42: note = Description of Artificial Sequence: Synthetic oligonucleotide
  source 1..42: mol_type = other DNA
gcgagagatggtgtatcagcacgtggtactccatttgactac

SEQ ID NO: 952 - protein, 14 aa, synthetic construct
  REGION 1..14: note = Description of Artificial Sequence: Synthetic peptide
ARDGVSARGTPFDY

SEQ ID NO: 953 - DNA, 321 bp, synthetic construct
  misc_feature 1..321: note = Description of Artificial Sequence: Synthetic polynucleotide
  source 1..321: mol_type = other DNA
gaaacgacactcacgcagtctccagcattcatgtcagcggctccaggagacaaagtcagcatctcctgcattgccagccagtacattgatgatgatgtgaactggtaccaacagaaaccaggagaaactgctattttcattattcaagaagcttctactctcgttcctggaatctcacctcgattcagtggcagcgggtatggaacacattttaccctcacaattaataacatagattctgaggatgctgcattttacttctgtctccaacatgataatttcccgtacacttttggccaggggaccaagctggagatcaaa

SEQ ID NO: 954 - protein, 107 aa, synthetic construct
  REGION 1..107: note = Description of Artificial Sequence: Synthetic polypeptide
ETTLTQSPAFMSAAPGDKVSISCIASQYIDDDVNWYQQKPGETAIFIIQEASTLVPGISPRFSGSGYGTHFTLTINNIDSEDAAFYFCLQHDNFPYTFGQGTKLEIK

SEQ ID NO: 955 - DNA, 18 bp, synthetic construct
  misc_feature 1..18: note = Description of Artificial Sequence: Synthetic oligonucleotide
  source 1..18: mol_type = other DNA
cagtacattgatgatgat

SEQ ID NO: 956 - protein, 6 aa, synthetic construct
  REGION 1..6: note = Description of Artificial Sequence: Synthetic peptide
QYIDDD

SEQ ID NO: 957-958 - skipped (2 entries)

SEQ ID NO: 959 - DNA, 27 bp, synthetic construct
  misc_feature 1..27: note = Description of Artificial Sequence: Synthetic oligonucleotide
  source 1..27: mol_type = other DNA
ctccaacatgataatttcccgtacact

SEQ ID NO: 960 - protein, 9 aa, synthetic construct
  REGION 1..9: note = Description of Artificial Sequence: Synthetic peptide
LQHDNFPYT

SEQ ID NO: 961 - DNA, 384 bp, synthetic construct
  misc_feature 1..384: note = Description of Artificial Sequence: Synthetic polynucleotide
  source 1..384: mol_type = other DNA
caggtgcagctggtggagtctgggggaggcttggtacagcctggggggtccctgagactctcctgtgcagcctcttatttcacctttagcagttttgccatgaactgggtccgccaggctccagggcagggcctggagtgggtctcagctattagtggtagggtctcagctattagtggtagtggtggtatcacatactacgcagactccgtgaagggccggttcatcatctccagagacaattccaagaacacgctgtatctgcaaatgagcggcctgagagccgaggacacggccgtatattactgtgcgaaaggcccctatttgactacagtcaccccctttgactactggggccagggaaccctggtcaccgtctcctca

SEQ ID NO: 962 - protein, 128 aa, synthetic construct
  REGION 1..128: note = Description of Artificial Sequence: Synthetic polypeptide
QVQLVESGGGLVQPGGSLRLSCAASYFTFSSFAMNWVRQAPGQGLEWVSAISGRVSAISGSGGITYYADSVKGRFIISRDNSKNTLYLQMSGLRAEDTAVYYCAKGPYLTTVTPFDYWGQGTLVTVSS

SEQ ID NO: 963 - DNA, 24 bp, synthetic construct
  misc_feature 1..24: note = Description of Artificial Sequence: Synthetic oligonucleotide
  source 1..24: mol_type = other DNA
tatttcacctttagcagttttgcc

SEQ ID NO: 964 - protein, 8 aa, synthetic construct
  REGION 1..8: note = Description of Artificial Sequence: Synthetic peptide
YFTFSSFA

SEQ ID NO: 965 - DNA, 24 bp, synthetic construct
  misc_feature 1..24: note = Description of Artificial Sequence: Synthetic oligonucleotide
  source 1..24: mol_type = other DNA
attagtggtagtggtggtatcaca

SEQ ID NO: 966 - protein, 8 aa, synthetic construct
  REGION 1..8: note = Description of Artificial Sequence: Synthetic peptide
ISGSGGIT

SEQ ID NO: 967 - DNA, 42 bp, synthetic construct
  misc_feature 1..42: note = Description of Artificial Sequence: Synthetic oligonucleotide
  source 1..42: mol_type = other DNA
gcgaaaggcccctatttgactacagtcaccccctttgactac

SEQ ID NO: 968 - protein, 14 aa, synthetic construct
  REGION 1..14: note = Description of Artificial Sequence: Synthetic peptide
AKGPYLTTVTPFDY

SEQ ID NO: 969 - DNA, 324 bp, synthetic construct
  misc_feature 1..324: note = Description of Artificial Sequence: Synthetic polynucleotide
  source 1..324: mol_type = other DNA
gacatccagttgacccagtctccatcttccgtgtctgcatctgtcggagacagagtcaccatcacttgtcgggcgagtcaggggattagcagctggttagcctggtatcagcagaaaccagggaaagcccctaaactcctgatctatgctgtatccagtttgcaaaatggggtcccatcaaggttcagcggcagtggatctgggacagatttcaccctcaccatcagcagcctgcagcctgaagactttgcaacttactattgtcaacaggctaacagtttcccattcactttcggccctgggaccaagctggagatcaaacga

SEQ ID NO: 970 - protein, 108 aa, synthetic construct
  REGION 1..108: note = Description of Artificial Sequence: Synthetic polypeptide
DIQLTQSPSSVSASVGDRVTITCRASQGISSWLAWYQQKPGKAPKLLIYAVSSLQNGVPSRFSGSGSGTDFTLTISSLQPEDFATYYCQQANSFPFTFGPGTKLEIKR

SEQ ID NO: 971 - DNA, 18 bp, synthetic construct
  misc_feature 1..18: note = Description of Artificial Sequence: Synthetic oligonucleotide
  source 1..18: mol_type = other DNA
caggggattagcagctgg

SEQ ID NO: 972 - protein, 6 aa, synthetic construct
  REGION 1..6: note = Description of Artificial Sequence: Synthetic peptide
QGISSW

SEQ ID NO: 973-974 - skipped (2 entries)

SEQ ID NO: 975 - DNA, 27 bp, synthetic construct
  misc_feature 1..27: note = Description of Artificial Sequence: Synthetic oligonucleotide
  source 1..27: mol_type = other DNA
caacaggctaacagtttcccattcact

SEQ ID NO: 976 - protein, 9 aa, synthetic construct
  REGION 1..9: note = Description of Artificial Sequence: Synthetic peptide
QQANSFPFT

SEQ ID NO: 977 - DNA, 369 bp, synthetic construct
  misc_feature 1..369: note = Description of Artificial Sequence: Synthetic polynucleotide
  source 1..369: mol_type = other DNA
gaggtgcagctggtggagtctgggggaggcttggtacagcctggcaggtccctgagactctcctgtgcagcctctggattcacctttgctgattatgccatgcactgggtccggcaagctccagggaagggcctggagtgggtctcaggtattagttggaatagtggtagtataggttatgcggactctgtgaagggccgattcaccatctccagagacaacgccaagaactccctgtatctgcaaatgaacagtctgagagctgaggacacggccttatattactgtgtaaaagataatagtggctacgcatcctactactacggtatggacgtctggggccaagggaccacggtcaccgtctcctca

SEQ ID NO: 978 - protein, 123 aa, synthetic construct
  REGION 1..123: note = Description of Artificial Sequence: Synthetic polypeptide
EVQLVESGGGLVQPGRSLRLSCAASGFTFADYAMHWVRQAPGKGLEWVSGISWNSGSIGYADSVKGRFTISRDNAKNSLYLQMNSLRAEDTALYYCVKDNSGYASYYYGMDVWGQGTTVTVSS

SEQ ID NO: 979 - DNA, 24 bp, synthetic construct
  misc_feature 1..24: note = Description of Artificial Sequence: Synthetic oligonucleotide
  source 1..24: mol_type = other DNA
ggattcacctttgctgattatgcc

SEQ ID NO: 980 - protein, 8 aa, synthetic construct
  REGION 1..8: note = Description of Artificial Sequence: Synthetic peptide
GFTFADYA

SEQ ID NO: 981 - DNA, 24 bp, synthetic construct
  misc_feature 1..24: note = Description of Artificial Sequence: Synthetic oligonucleotide
  source 1..24: mol_type = other DNA
attagttggaatagtggtagtata

SEQ ID NO: 982 - protein, 8 aa, synthetic construct
  REGION 1..8: note = Description of Artificial Sequence: Synthetic peptide
ISWNSGSI

SEQ ID NO: 983 - DNA, 48 bp, synthetic construct
  misc_feature 1..48: note = Description of Artificial Sequence: Synthetic oligonucleotide
  source 1..48: mol_type = other DNA
gtaaaagataatagtggctacgcatcctactactacggtatggacgtc

SEQ ID NO: 984 - protein, 16 aa, synthetic construct
  REGION 1..16: note = Description of Artificial Sequence: Synthetic peptide
VKDNSGYASYYYGMDV

SEQ ID NO: 985 - DNA, 324 bp, synthetic construct
  misc_feature 1..324: note = Description of Artificial Sequence: Synthetic polynucleotide
  source 1..324: mol_type = other DNA
gacatccagttgacccagtccccatcctccctgtctgcatctgtaggagacagagtcaccatcacttgccgggcaagtcagagcattagcagctatttaaattggtatcagcagaaaccagggaaagcccctaagctcctgatctacgatgcatccaatttggaaacaggggtcccatcaaggttcagtggaagtggatctgggacagattttactttcaccatcagcagcctgcagcctgaagatattgcaacatattactgtcaacagtatgataatctcccattcactttcggccctgggaccaaagtggatatcaaacga

SEQ ID NO: 986 - protein, 108 aa, synthetic construct
  REGION 1..108: note = Description of Artificial Sequence: Synthetic polypeptide
DIQLTQSPSSLSASVGDRVTITCRASQSISSYLNWYQQKPGKAPKLLIYDASNLETGVPSRFSGSGSGTDFTFTISSLQPEDIATYYCQQYDNLPFTFGPGTKVDIKR

SEQ ID NO: 987 - DNA, 18 bp, synthetic construct
  misc_feature 1..18: note = Description of Artificial Sequence: Synthetic oligonucleotide
  source 1..18: mol_type = other DNA
cagagcattagcagctat

SEQ ID NO: 988 - protein, 6 aa, synthetic construct
  REGION 1..6: note = Description of Artificial Sequence: Synthetic peptide
QSISSY

SEQ ID NO: 989-990 - skipped (2 entries)

SEQ ID NO: 991 - DNA, 27 bp, synthetic construct
  misc_feature 1..27: note = Description of Artificial Sequence: Synthetic oligonucleotide
  source 1..27: mol_type = other DNA
caacagtatgataatctcccattcact

SEQ ID NO: 992 - protein, 9 aa, synthetic construct
  REGION 1..9: note = Description of Artificial Sequence: Synthetic peptide
QQYDNLPFT

SEQ ID NO: 993 - DNA, 378 bp, synthetic construct
  misc_feature 1..378: note = Description of Artificial Sequence: Synthetic polynucleotide
  source 1..378: mol_type = other DNA
gaggtgcagctggtggagtctgggggaggcgtggtccagcctgggaggtccctgagactctcctgtgcagcctctggattcaccttcagtaactatggcatgcactgggtccgccaggctccaggcaaagggctggagtgggtgacagttatattacatgatggaagttataaatactatgcagactccgtgaagggccgattcaccatctccagagacaattccaagaacacgctacatctgcaaatgaacagcctgagaactgaggacacggctgtatattactgtgcgaaagggcctatgtttcggggagtcccttacaaccactactatggtatggacgtctggggccaagggaccacggtcaccgtctcctca

SEQ ID NO: 994 - protein, 126 aa, synthetic construct
  REGION 1..126: note = Description of Artificial Sequence: Synthetic polypeptide
EVQLVESGGGVVQPGRSLRLSCAASGFTFSNYGMHWVRQAPGKGLEWVTVILHDGSYKYYADSVKGRFTISRDNSKNTLHLQMNSLRTEDTAVYYCAKGPMFRGVPYNHYYGMDVWGQGTTVTVSS

SEQ ID NO: 995 - DNA, 24 bp, synthetic construct
  misc_feature 1..24: note = Description of Artificial Sequence: Synthetic oligonucleotide
  source 1..24: mol_type = other DNA
ggattcaccttcagtaactatggc

SEQ ID NO: 996 - protein, 8 aa, synthetic construct
  REGION 1..8: note = Description of Artificial Sequence: Synthetic peptide
GFTFSNYG

SEQ ID NO: 997 - DNA, 24 bp, synthetic construct
  misc_feature 1..24: note = Description of Artificial Sequence: Synthetic oligonucleotide
  source 1..24: mol_type = other DNA
atattacatgatggaagttataaa

SEQ ID NO: 998 - protein, 8 aa, synthetic construct
  REGION 1..8: note = Description of Artificial Sequence: Synthetic peptide
ILHDGSYK

SEQ ID NO: 999 - DNA, 57 bp, synthetic construct
  misc_feature 1..57: note = Description of Artificial Sequence: Synthetic oligonucleotide
  source 1..57: mol_type = other DNA
gcgaaagggcctatgtttcggggagtcccttacaaccactactatggtatggacgtc

SEQ ID NO: 1000 - protein, 19 aa, synthetic construct
  REGION 1..19: note = Description of Artificial Sequence: Synthetic peptide
AKGPMFRGVPYNHYYGMDV

SEQ ID NO: 1001 - DNA, 324 bp, synthetic construct
  misc_feature 1..324: note = Description of Artificial Sequence: Synthetic polynucleotide
  source 1..324: mol_type = other DNA
gacatccagatgacccagtctccatcctccctgtctgcatctgtaggagacagagtcaccatcacttgccgggcaagtcagggcatcagaaatgatttaggctggtatcagcagaaaccagggaaagcccctaagcgcctgatctatgctgcatccagtttgcaaagtggggtctcatcaaggttcagcggcagtggatctgggacagaattcactctcacaatcagcagcctgcagcctgaagattttgcaacttattactgtctacagcataatagttacccgtacacttttggccaggggaccaaggtggaaatcaaacga

SEQ ID NO: 1002 - protein, 108 aa, synthetic construct
  REGION 1..108: note = Description of Artificial Sequence: Synthetic polypeptide
DIQMTQSPSSLSASVGDRVTITCRASQGIRNDLGWYQQKPGKAPKRLIYAASSLQSGVSSRFSGSGSGTEFTLTISSLQPEDFATYYCLQHNSYPYTFGQGTKVEIKR

SEQ ID NO: 1003 - DNA, 18 bp, synthetic construct
  misc_feature 1..18: note = Description of Artificial Sequence: Synthetic oligonucleotide
  source 1..18: mol_type = other DNA
cagggcatcagaaatgat

SEQ ID NO: 1004 - protein, 6 aa, synthetic construct
  REGION 1..6: note = Description of Artificial Sequence: Synthetic peptide
QGIRND

SEQ ID NO: 1005-1006 - skipped (2 entries)

SEQ ID NO: 1007 - DNA, 27 bp, synthetic construct
  misc_feature 1..27: note = Description of Artificial Sequence: Synthetic oligonucleotide
  source 1..27: mol_type = other DNA
ctacagcataatagttacccgtacact

SEQ ID NO: 1008 - protein, 9 aa, synthetic construct
  REGION 1..9: note = Description of Artificial Sequence: Synthetic peptide
LQHNSYPYT

SEQ ID NO: 1009 - DNA, 357 bp, synthetic construct
  misc_feature 1..357: note = Description of Artificial Sequence: Synthetic polynucleotide
  source 1..357: mol_type = other DNA
gaggtgcagctggtggagtctgggggaggcgtggtccagcctgggaggtccctgagactctcctgtacagcgtcaggtttccccttcagtcgctatggcatgcactgggtccgccaggctccaggcaaggggctggaatgggtgacatttatatggtatgatggaagtaataaatactatgcagactccgcgaagggccgattcaccatcaccagagacaattccaagaacacggtgtatctgcaaatggacagcctgagagccgatgacacggctgtttattattgtgtgagagatcaggcagctctctactattttgactcttggggccagggaaccctggtcaccgtctcctca

SEQ ID NO: 1010 - protein, 119 aa, synthetic construct
  REGION 1..119: note = Description of Artificial Sequence: Synthetic polypeptide
EVQLVESGGGVVQPGRSLRLSCTASGFPFSRYGMHWVRQAPGKGLEWVTFIWYDGSNKYYADSAKGRFTITRDNSKNTVYLQMDSLRADDTAVYYCVRDQAALYYFDSWGQGTLVTVSS

SEQ ID NO: 1011 - DNA, 24 bp, synthetic construct
  misc_feature 1..24: note = Description of Artificial Sequence: Synthetic oligonucleotide
  source 1..24: mol_type = other DNA
ggtttccccttcagtcgctatggc

SEQ ID NO: 1012 - protein, 8 aa, synthetic construct
  REGION 1..8: note = Description of Artificial Sequence: Synthetic peptide
GFPFSRYG

SEQ ID NO: 1013 - DNA, 24 bp, synthetic construct
  misc_feature 1..24: note = Description of Artificial Sequence: Synthetic oligonucleotide
  source 1..24: mol_type = other DNA
atatggtatgatggaagtaataaa

SEQ ID NO: 1014 - protein, 8 aa, synthetic construct
  REGION 1..8: note = Description of Artificial Sequence: Synthetic peptide
IWYDGSNK

SEQ ID NO: 1015 - DNA, 36 bp, synthetic construct
  misc_feature 1..36: note = Description of Artificial Sequence: Synthetic oligonucleotide
  source 1..36: mol_type = other DNA
gtgagagatcaggcagctctctactattttgactct

SEQ ID NO: 1016 - protein, 12 aa, synthetic construct
  REGION 1..12: note = Description of Artificial Sequence: Synthetic peptide
VRDQAALYYFDS

SEQ ID NO: 1017 - DNA, 324 bp, synthetic construct
  misc_feature 1..324: note = Description of Artificial Sequence: Synthetic polynucleotide
  source 1..324: mol_type = other DNA
gacatccagatgacccagtctccatcttccgtgtctgcatctgtaggagacagagtcaccatcacttgtcgggcgagtcagggtattagcaggtggttagcctggtatcagcagaaaccagggaaagcccctaagctcctgatctctgctgcatccagtttgcaaagtggagtcccatcaaggttcagcggcagtggatctgggacagatttcactctcaccatcagcggcctgcagcctgaagattttgcaacttactattgtcaaaaggctaacagtttccctttcactttcggccctgggaccaagctggagatcaaacga

SEQ ID NO: 1018 - protein, 108 aa, synthetic construct
  REGION 1..108: note = Description of Artificial Sequence: Synthetic polypeptide
DIQMTQSPSSVSASVGDRVTITCRASQGISRWLAWYQQKPGKAPKLLISAASSLQSGVPSRFSGSGSGTDFTLTISGLQPEDFATYYCQKANSFPFTFGPGTKLEIKR

SEQ ID NO: 1019 - DNA, 18 bp, synthetic construct
  misc_feature 1..18: note = Description of Artificial Sequence: Synthetic oligonucleotide
  source 1..18: mol_type = other DNA
cagggtattagcaggtgg

SEQ ID NO: 1020 - protein, 6 aa, synthetic construct
  REGION 1..6: note = Description of Artificial Sequence: Synthetic peptide
QGISRW

SEQ ID NO: 1021-1022 - skipped (2 entries)

SEQ ID NO: 1023 - DNA, 27 bp, synthetic construct
  misc_feature 1..27: note = Description of Artificial Sequence: Synthetic oligonucleotide
  source 1..27: mol_type = other DNA
caaaaggctaacagtttccctttcact

SEQ ID NO: 1024 - protein, 9 aa, synthetic construct
  REGION 1..9: note = Description of Artificial Sequence: Synthetic peptide
QKANSFPFT

SEQ ID NO: 1025 - DNA, 378 bp, synthetic construct
  misc_feature 1..378: note = Description of Artificial Sequence: Synthetic polynucleotide
  source 1..378: mol_type = other DNA
gaggtgcagctggtggagtctgggggaggcgtggtccagcctgggaggtccctgagactctcctgtgcagcctctggattcaccttcagtagttatggcatgcactgggtccgccaggctccaggcaaggggctggagtgggtgacagttatattacatgatggaagtaatagatactctgcagactccgtgaagggccgattcaccatctccagagacaattccaagaacacgctttatctgcaaatgaacatcctgagagttgaggacacggctgtgtattactgtacgaaaggggctatggttcggggagtcccttacaatcactactacggcatggacgtctggggccaagggaccacggtcaccgtctcctca

SEQ ID NO: 1026 - protein, 126 aa, synthetic construct
  REGION 1..126: note = Description of Artificial Sequence: Synthetic polypeptide
EVQLVESGGGVVQPGRSLRLSCAASGFTFSSYGMHWVRQAPGKGLEWVTVILHDGSNRYSADSVKGRFTISRDNSKNTLYLQMNILRVEDTAVYYCTKGAMVRGVPYNHYYGMDVWGQGTTVTVSS

SEQ ID NO: 1027 - DNA, 24 bp, synthetic construct
  misc_feature 1..24: note = Description of Artificial Sequence: Synthetic oligonucleotide
  source 1..24: mol_type = other DNA
ggattcaccttcagtagttatggc

SEQ ID NO: 1028 - protein, 8 aa, synthetic construct
  REGION 1..8: note = Description of Artificial Sequence: Synthetic peptide
GFTFSSYG

SEQ ID NO: 1029 - DNA, 24 bp, synthetic construct
  misc_feature 1..24: note = Description of Artificial Sequence: Synthetic oligonucleotide
  source 1..24: mol_type = other DNA
atattacatgatggaagtaataga

SEQ ID NO: 1030 - protein, 8 aa, synthetic construct
  REGION 1..8: note = Description of Artificial Sequence: Synthetic peptide
ILHDGSNR

SEQ ID NO: 1031 - DNA, 57 bp, synthetic construct
  misc_feature 1..57: note = Description of Artificial Sequence: Synthetic oligonucleotide
  source 1..57: mol_type = other DNA
acgaaaggggctatggttcggggagtcccttacaatcactactacggcatggacgtc

SEQ ID NO: 1032 - protein, 19 aa, synthetic construct
  REGION 1..19: note = Description of Artificial Sequence: Synthetic peptide
TKGAMVRGVPYNHYYGMDV

SEQ ID NO: 1033 - DNA, 324 bp, synthetic construct
  misc_feature 1..324: note = Description of Artificial Sequence: Synthetic polynucleotide
  source 1..324: mol_type = other DNA
gacatccagatgacccagtctccatcctccctgtctgcatctgtaggagacagagtcaccatcacttgccgggcaagtcagggcattagaaatgatttaggctggtatcagcagaaaccagggaaagcccctaagcgcctaatctatgctgcatccattttgcaaagtggggtcccatcaaggttcagcggcagtggatctgggacagaattcactctcacaatcagcagcctgcagcctgaagattttgcaacttattactgtctacagcataatagttacccgtacacttttggccaggggaccaagctggagatcaaacga

SEQ ID NO: 1034 - protein, 108 aa, synthetic construct
  REGION 1..108: note = Description of Artificial Sequence: Synthetic polypeptide
DIQMTQSPSSLSASVGDRVTITCRASQGIRNDLGWYQQKPGKAPKRLIYAASILQSGVPSRFSGSGSGTEFTLTISSLQPEDFATYYCLQHNSYPYTFGQGTKLEIKR

SEQ ID NO: 1035 - DNA, 18 bp, synthetic construct
  misc_feature 1..18: note = Description of Artificial Sequence: Synthetic oligonucleotide
  source 1..18: mol_type = other DNA
cagggcattagaaatgat

SEQ ID NO: 1036 - protein, 6 aa, synthetic construct
  REGION 1..6: note = Description of Artificial Sequence: Synthetic peptide
QGIRND

SEQ ID NO: 1037-1038 - skipped (2 entries)

SEQ ID NO: 1039 - DNA, 27 bp, synthetic construct
  misc_feature 1..27: note = Description of Artificial Sequence: Synthetic oligonucleotide
  source 1..27: mol_type = other DNA
ctacagcataatagttacccgtacact

SEQ ID NO: 1040 - protein, 9 aa, synthetic construct
  REGION 1..9: note = Description of Artificial Sequence: Synthetic peptide
LQHNSYPYT

SEQ ID NO: 1041 - DNA, 378 bp, synthetic construct
  misc_feature 1..378: note = Description of Artificial Sequence: Synthetic polynucleotide
  source 1..378: mol_type = other DNA
gaggtgcagctggtggagtctgggggaggcgtggtccagcctgggaggtccctgagactctcctgtgcagcctctggattcaccttcagtagctatggcatgcactgggtccgccaggctccaggcaaggggctggagtgggtgacagttatattacatgatggaagtaatagatactatgcagactccgtgaagggccgattcaccatctccagagacaattccaagaacacgctttatctgcaaatgaacatcctgagagctgaggacacggctgtgtattactgtacgaaaggggctatggttcggggagtcccttacaatcactactacggcatggacgtctggggccaagggaccacggtcaccgtctcctca

SEQ ID NO: 1042 - protein, 126 aa, synthetic construct
  REGION 1..126: note = Description of Artificial Sequence: Synthetic polypeptide
EVQLVESGGGVVQPGRSLRLSCAASGFTFSSYGMHWVRQAPGKGLEWVTVILHDGSNRYYADSVKGRFTISRDNSKNTLYLQMNILRAEDTAVYYCTKGAMVRGVPYNHYYGMDVWGQGTTVTVSS

SEQ ID NO: 1043 - DNA, 24 bp, synthetic construct
  misc_feature 1..24: note = Description of Artificial Sequence: Synthetic oligonucleotide
  source 1..24: mol_type = other DNA
ggattcaccttcagtagctatggc

SEQ ID NO: 1044 - protein, 8 aa, synthetic construct
  REGION 1..8: note = Description of Artificial Sequence: Synthetic peptide
GFTFSSYG

SEQ ID NO: 1045 - DNA, 24 bp, synthetic construct
  misc_feature 1..24: note = Description of Artificial Sequence: Synthetic oligonucleotide
  source 1..24: mol_type = other DNA
atattacatgatggaagtaataga

SEQ ID NO: 1046 - protein, 8 aa, synthetic construct
  REGION 1..8: note = Description of Artificial Sequence: Synthetic peptide
ILHDGSNR

SEQ ID NO: 1047 - DNA, 57 bp, synthetic construct; identical to SEQ ID NO: 1031
  misc_feature 1..57: note = Description of Artificial Sequence: Synthetic oligonucleotide
  source 1..57: mol_type = other DNA

SEQ ID NO: 1048 - protein, 19 aa, synthetic construct
  REGION 1..19: note = Description of Artificial Sequence: Synthetic peptide
TKGAMVRGVPYNHYYGMDV

SEQ ID NO: 1049 - DNA, 324 bp, synthetic construct
  misc_feature 1..324: note = Description of Artificial Sequence: Synthetic polynucleotide
  source 1..324: mol_type = other DNA
gacatcgtgatgacccagtctccatcctccctgtctgcatctgtaggagacagagtcaccatcacttgccgggcaagtcagggcattagaaatgatttaggctggtatcagcagaaaccagggaaagcccctaagcgcctgatctatgctgcatccaatttgcaaagtggggtcccatcaaggttcagcggcagtggatctgggacagaattcactctcacaatcagcagcctgcagcctgaagattttgcaacttattactgtctacagcataatagttacccgtacacttttggccaggggaccaagctggagatcaaacga

SEQ ID NO: 1050 - protein, 108 aa, synthetic construct
  REGION 1..108: note = Description of Artificial Sequence: Synthetic polypeptide
DIVMTQSPSSLSASVGDRVTITCRASQGIRNDLGWYQQKPGKAPKRLIYAASNLQSGVPSRFSGSGSGTEFTLTISSLQPEDFATYYCLQHNSYPYTFGQGTKLEIKR

SEQ ID NO: 1051 - DNA, 18 bp, synthetic construct
  misc_feature 1..18: note = Description of Artificial Sequence: Synthetic oligonucleotide
  source 1..18: mol_type = other DNA
cagggcattagaaatgat

SEQ ID NO: 1052 - protein, 6 aa, synthetic construct
  REGION 1..6: note = Description of Artificial Sequence: Synthetic peptide
QGIRND

SEQ ID NO: 1053-1054 - skipped (2 entries)

SEQ ID NO: 1055 - DNA, 27 bp, synthetic construct
  misc_feature 1..27: note = Description of Artificial Sequence: Synthetic oligonucleotide
  source 1..27: mol_type = other DNA
ctacagcataatagttacccgtacact

SEQ ID NO: 1056 - protein, 9 aa, synthetic construct
  REGION 1..9: note = Description of Artificial Sequence: Synthetic peptide
LQHNSYPYT

SEQ ID NO: 1057 - DNA, 378 bp, synthetic construct
  misc_feature 1..378: note = Description of Artificial Sequence: Synthetic polynucleotide
  source 1..378: mol_type = other DNA
caggtgcagctggtggagtctgggggaggcgtggtccagcctgggaggtccctgagactctcctgtgcagcctctggattcaccttcagtagctatggcatgcactgggtccgccaggctccaggcaaggggctggagtgggtggcagttatatcatatgatggaagtaataaatactatgcagactccgtgaagggccgattcaccatctccagagactattccaagaacacgctgtatctgcaaatgaacagcctgagagctgaggacacggctgtgttttactgtgcgaaaggggctatggttcggggagtcccttacaactactactacggtatggacgtctggggccaagggaccacggtcaccgtctcctca

SEQ ID NO: 1058 - protein, 126 aa, synthetic construct
  REGION 1..126: note = Description of Artificial Sequence: Synthetic polypeptide
QVQLVESGGGVVQPGRSLRLSCAASGFTFSSYGMHWVRQAPGKGLEWVAVISYDGSNKYYADSVKGRFTISRDYSKNTLYLQMNSLRAEDTAVFYCAKGAMVRGVPYNYYYGMDVWGQGTTVTVSS

SEQ ID NO: 1059 - DNA, 24 bp, synthetic construct
  misc_feature 1..24: note = Description of Artificial Sequence: Synthetic oligonucleotide
  source 1..24: mol_type = other DNA
ggattcaccttcagtagctatggc

SEQ ID NO: 1060 - protein, 8 aa, synthetic construct
  REGION 1..8: note = Description of Artificial Sequence: Synthetic peptide
GFTFSSYG

SEQ ID NO: 1061 - DNA, 24 bp, synthetic construct
  misc_feature 1..24: note = Description of Artificial Sequence: Synthetic oligonucleotide
  source 1..24: mol_type = other DNA
atatcatatgatggaagtaataaa

SEQ ID NO: 1062 - protein, 8 aa, synthetic construct
  REGION 1..8: note = Description of Artificial Sequence: Synthetic peptide
ISYDGSNK

SEQ ID NO: 1063 - DNA, 57 bp, synthetic construct
  misc_feature 1..57: note = Description of Artificial Sequence: Synthetic oligonucleotide
  source 1..57: mol_type = other DNA
gcgaaaggggctatggttcggggagtcccttacaactactactacggtatggacgtc

SEQ ID NO: 1064 - protein, 19 aa, synthetic construct
  REGION 1..19: note = Description of Artificial Sequence: Synthetic peptide
AKGAMVRGVPYNYYYGMDV

SEQ ID NO: 1065 - DNA, 321 bp, synthetic construct
  misc_feature 1..321: note = Description of Artificial Sequence: Synthetic polynucleotide
  source 1..321: mol_type = other DNA
gacatccagatgacccagtctccatcctccctgtctgcatctgtaggagacagagtcaccatcacttgccgggcaagtcagggcattagaaatgatttaggctggtttcagcagaaaccagggaaagcccctaagcgcctgatctatgctgcatccagtttgcaaagtggggtcccatcaaggttcagcggcagtggatctgggacagaattcactctcacaatcagcagcctgcagcctgaagattttgcaacttattactgtctacagcataatagttacccgtacacttttggccaggggaccaagctggagatcaaa

SEQ ID NO: 1066 - protein, 107 aa, synthetic construct
  REGION 1..107: note = Description of Artificial Sequence: Synthetic polypeptide
DIQMTQSPSSLSASVGDRVTITCRASQGIRNDLGWFQQKPGKAPKRLIYAASSLQSGVPSRFSGSGSGTEFTLTISSLQPEDFATYYCLQHNSYPYTFGQGTKLEIK

SEQ ID NO: 1067 - DNA, 18 bp, synthetic construct
  misc_feature 1..18: note = Description of Artificial Sequence: Synthetic oligonucleotide
  source 1..18: mol_type = other DNA
cagggcattagaaatgat

SEQ ID NO: 1068 - protein, 6 aa, synthetic construct
  REGION 1..6: note = Description of Artificial Sequence: Synthetic peptide
QGIRND

SEQ ID NO: 1069-1070 - skipped (2 entries)

SEQ ID NO: 1071 - DNA, 27 bp, synthetic construct
  misc_feature 1..27: note = Description of Artificial Sequence: Synthetic oligonucleotide
  source 1..27: mol_type = other DNA
ctacagcataatagttacccgtacact

SEQ ID NO: 1072 - protein, 9 aa, synthetic construct
  REGION 1..9: note = Description of Artificial Sequence: Synthetic peptide
LQHNSYPYT

SEQ ID NO: 1073 - DNA, 378 bp, synthetic construct
  misc_feature 1..378: note = Description of Artificial Sequence: Synthetic polynucleotide
  source 1..378: mol_type = other DNA
caggtgcagctggtggagtctgggggaggcgtggtccagcctgggaggtccctgagactctcctgtgcagcctctggactcaccttcagtagctatggcatgcactgggtccgccaggctccaggcaaggggctggagtgggtggcagttatatcatatgatggaagtaataaatactatacagactccgtgaagggccgattcaccatctccagagacaattctaagaacacgctgtatctgcaaatgaacagcctgagagctgaggacacggctgtgtattactgtgcgaaaggggccatggttcggggagtcccttacaactactactacggtatggacgtctggggccaagggaccacggtcaccgtctcctca

SEQ ID NO: 1074 - protein, 126 aa, synthetic construct
  REGION 1..126: note = Description of Artificial Sequence: Synthetic polypeptide
QVQLVESGGGVVQPGRSLRLSCAASGLTFSSYGMHWVRQAPGKGLEWVAVISYDGSNKYYTDSVKGRFTISRDNSKNTLYLQMNSLRAEDTAVYYCAKGAMVRGVPYNYYYGMDVWGQGTTVTVSS

SEQ ID NO: 1075 - DNA, 24 bp, synthetic construct
  misc_feature 1..24: note = Description of Artificial Sequence: Synthetic oligonucleotide
  source 1..24: mol_type = other DNA
ggactcaccttcagtagctatggc

SEQ ID NO: 1076 - protein, 8 aa, synthetic construct
  REGION 1..8: note = Description of Artificial Sequence: Synthetic peptide
GLTFSSYG

SEQ ID NO: 1077 - DNA, 24 bp, synthetic construct
  misc_feature 1..24: note = Description of Artificial Sequence: Synthetic oligonucleotide
  source 1..24: mol_type = other DNA
atatcatatgatggaagtaataaa

SEQ ID NO: 1078 - protein, 8 aa, synthetic construct
  REGION 1..8: note = Description of Artificial Sequence: Synthetic peptide
ISYDGSNK

SEQ ID NO: 1079 - DNA, 57 bp, synthetic construct
  misc_feature 1..57: note = Description of Artificial Sequence: Synthetic oligonucleotide
  source 1..57: mol_type = other DNA
gcgaaaggggccatggttcggggagtcccttacaactactactacggtatggacgtc

SEQ ID NO: 1080 - protein, 19 aa, synthetic construct
  REGION 1..19: note = Description of Artificial Sequence: Synthetic peptide
AKGAMVRGVPYNYYYGMDV

SEQ ID NO: 1081 - DNA, 321 bp, synthetic construct
  misc_feature 1..321: note = Description of Artificial Sequence: Synthetic polynucleotide
  source 1..321: mol_type = other DNA
gacatccagatgacccagtctccatcctccctgtctgcatctgtaggagacagagtcaccatcacttgccgggcaagtcagggcattagaaatgatttaggctggtatcagcagaaaccagggaaagcccctaagcgcctgatctatgctgcgtccagtttgcaaagtggggtcccatcaaggttcagcggcagtggatctgggacagaattcactctcacaatcagcagcctgcagcctgaagattttgcaacttattactgtctacagcataatagttacccgtacacttttggccaggggaccaagctggagatcaaa

SEQ ID NO: 1082 - protein, 107 aa, synthetic construct
  REGION 1..107: note = Description of Artificial Sequence: Synthetic polypeptide
DIQMTQSPSSLSASVGDRVTITCRASQGIRNDLGWYQQKPGKAPKRLIYAASSLQSGVPSRFSGSGSGTEFTLTISSLQPEDFATYYCLQHNSYPYTFGQGTKLEIK

SEQ ID NO: 1083 - DNA, 18 bp, synthetic construct
  misc_feature 1..18: note = Description of Artificial Sequence: Synthetic oligonucleotide
  source 1..18: mol_type = other DNA
cagggcattagaaatgat

SEQ ID NO: 1084 - protein, 6 aa, synthetic construct
  REGION 1..6: note = Description of Artificial Sequence: Synthetic peptide
QGIRND

SEQ ID NO: 1085-1086 - skipped (2 entries)

SEQ ID NO: 1087 - DNA, 27 bp, synthetic construct
  misc_feature 1..27: note = Description of Artificial Sequence: Synthetic oligonucleotide
  source 1..27: mol_type = other DNA
ctacagcataatagttacccgtacact

SEQ ID NO: 1088 - protein, 9 aa, synthetic construct
  REGION 1..9: note = Description of Artificial Sequence: Synthetic peptide
LQHNSYPYT

SEQ ID NO: 1089 - DNA, 378 bp, synthetic construct
  misc_feature 1..378: note = Description of Artificial Sequence: Synthetic polynucleotide
  source 1..378: mol_type = other DNA
caggtgcagctggtggagtctgggggaggcgtggtccagcctgggaggtccctgagactctcctgtgcagcctctggattcaccttcaggagctttggcatgcactgggtccgccaggctccaggcaaggggctggagtgggtggcagttatttcatatgatggaaattataaatactatgcagactccgtgaagggccgattcaccatctccagagacaattccaagaacacgctgtatctgcaaatgaacagcctgagagctgaggacacggctgtacattactgtgcgaaaggggctatggttcggggagtcccttacaacttctactacggtatggacgtctggggccaagggaccacggtcaccgtctcctca

SEQ ID NO: 1090 - protein, 126 aa, synthetic construct
  REGION 1..126: note = Description of Artificial Sequence: Synthetic polypeptide
QVQLVESGGGVVQPGRSLRLSCAASGFTFRSFGMHWVRQAPGKGLEWVAVISYDGNYKYYADSVKGRFTISRDNSKNTLYLQMNSLRAEDTAVHYCAKGAMVRGVPYNFYYGMDVWGQGTTVTVSS

SEQ ID NO: 1091 - DNA, 24 bp, synthetic construct
  misc_feature 1..24: note = Description of Artificial Sequence: Synthetic oligonucleotide
  source 1..24: mol_type = other DNA
ggattcaccttcaggagctttggc

SEQ ID NO: 1092 - protein, 8 aa, synthetic construct
  REGION 1..8: note = Description of Artificial Sequence: Synthetic peptide
GFTFRSFG

SEQ ID NO: 1093 - DNA, 24 bp, synthetic construct
  misc_feature 1..24: note = Description of Artificial Sequence: Synthetic oligonucleotide
  source 1..24: mol_type = other DNA
atttcatatgatggaaattataaa

SEQ ID NO: 1094 - protein, 8 aa, synthetic construct
  REGION 1..8: note = Description of Artificial Sequence: Synthetic peptide
ISYDGNYK

SEQ ID NO: 1095 - DNA, 57 bp, synthetic construct
  misc_feature 1..57: note = Description of Artificial Sequence: Synthetic oligonucleotide
  source 1..57: mol_type = other DNA
gcgaaaggggctatggttcggggagtcccttacaacttctactacggtatggacgtc

SEQ ID NO: 1096 - protein, 19 aa, synthetic construct
  REGION 1..19: note = Description of Artificial Sequence: Synthetic peptide
AKGAMVRGVPYNFYYGMDV

SEQ ID NO: 1097 - DNA, 321 bp, synthetic construct
  misc_feature 1..321: note = Description of Artificial Sequence: Synthetic polynucleotide
  source 1..321: mol_type = other DNA
gacatccagatgacccagtctccatcctccctgtctgcatctgtaggagacagagtcaccatcacttgccgggcaagtcaggtcattagaaatgatttaggctggtatcagcagaaaccagggaaagcccctaagcgcctgatctatgctgcatccagtttgcaaagtgggatcccatcaaggttcagcggcagtggatctgggacagaattcactctcacaatcagcagcctgcagcctgaagattttgcaacttattactgtctacagcataatagttacccgtacacttttggccaggggaccaagctggagatcaaa

SEQ ID NO: 1098 - protein, 107 aa, synthetic construct
  REGION 1..107: note = Description of Artificial Sequence: Synthetic polypeptide
DIQMTQSPSSLSASVGDRVTITCRASQVIRNDLGWYQQKPGKAPKRLIYAASSLQSGIPSRFSGSGSGTEFTLTISSLQPEDFATYYCLQHNSYPYTFGQGTKLEIK

SEQ ID NO: 1099 - DNA, 18 bp, synthetic construct
  misc_feature 1..18: note = Description of Artificial Sequence: Synthetic oligonucleotide
  source 1..18: mol_type = other DNA
caggtcattagaaatgat

SEQ ID NO: 1100 - protein, 6 aa, synthetic construct
  REGION 1..6: note = Description of Artificial Sequence: Synthetic peptide
QVIRND

SEQ ID NO: 1101-1102 - skipped (2 entries)

SEQ ID NO: 1103 - DNA, 27 bp, synthetic construct
  misc_feature 1..27: note = Description of Artificial Sequence: Synthetic oligonucleotide
  source 1..27: mol_type = other DNA
ctacagcataatagttacccgtacact

SEQ ID NO: 1104 - protein, 9 aa, synthetic construct
  REGION 1..9: note = Description of Artificial Sequence: Synthetic peptide
LQHNSYPYT

SEQ ID NO: 1105 - DNA, 369 bp, synthetic construct
  misc_feature 1..369: note = Description of Artificial Sequence: Synthetic polynucleotide
  source 1..369: mol_type = other DNA
gaggtgcagctggtggagtctgggggaggcttggtacagcctggcaggtccctgagactctcctgtgcagcctctggattcacctttgatgattataccatgcactgggtccggcaagttccaggaaagggcctggagtggatctcaggtattagttggaatagtggtagcatggactatgcggactctgtgaagggccgattcaccatctctagagacaacgccaggaactccctgtttctgcaaatgaacagtgtgagaactgaggacacggccttgtattactgtgcaaaagataagagtggctacggctccttctactacggtatggacgtctggggccaggggaccacggtcaccgtctcctca

SEQ ID NO: 1106 - protein, 123 aa, synthetic construct
  REGION 1..123: note = Description of Artificial Sequence: Synthetic polypeptide
EVQLVESGGGLVQPGRSLRLSCAASGFTFDDYTMHWVRQVPGKGLEWISGISWNSGSMDYADSVKGRFTISRDNARNSLFLQMNSVRTEDTALYYCAKDKSGYGSFYYGMDVWGQGTTVTVSS

SEQ ID NO: 1107 - DNA, 24 bp, synthetic construct
  misc_feature 1..24: note = Description of Artificial Sequence: Synthetic oligonucleotide
  source 1..24: mol_type = other DNA
ggattcacctttgatgattatacc

SEQ ID NO: 1108 - protein, 8 aa, synthetic construct
  REGION 1..8: note = Description of Artificial Sequence: Synthetic peptide
GFTFDDYT

SEQ ID NO: 1109 - DNA, 24 bp, synthetic construct
  misc_feature 1..24: note = Description of Artificial Sequence: Synthetic oligonucleotide
  source 1..24: mol_type = other DNA
attagttggaatagtggtagcatg

SEQ ID NO: 1110 - protein, 8 aa, synthetic construct
  REGION 1..8: note = Description of Artificial Sequence: Synthetic peptide
ISWNSGSM

SEQ ID NO: 1111 - DNA, 48 bp, synthetic construct
  misc_feature 1..48: note = Description of Artificial Sequence: Synthetic oligonucleotide
  source 1..48: mol_type = other DNA
gcaaaagataagagtggctacggctccttctactacggtatggacgtc

SEQ ID NO: 1112 - protein, 16 aa, synthetic construct
  REGION 1..16: note = Description of Artificial Sequence: Synthetic peptide
AKDKSGYGSFYYGMDV

SEQ ID NO: 1113 - DNA, 324 bp, synthetic construct
  misc_feature 1..324: note = Description of Artificial Sequence: Synthetic polynucleotide
  source 1..324: mol_type = other DNA
gaaattgtgttgacgcagtctccaggcaccctgtctttgtctccaggggacagagccaccctctcctgcagggccagtcagagtgtcagcagcatctacttagcctggtaccagcagaaacctggccaggctcccaggctcctcatccatggtgcgtccaccagggccactggcatcccagacaggttcagtggcagtgggtcagggacagacttcactctcaccatcagcagactggagcctgaagattttgcagtttattactgtcagcagcgtgctcactcaccgtacacttttggccaggggaccaagctggagatcaaa

SEQ ID NO: 1114 - protein, 108 aa, synthetic construct
  REGION 1..108: note = Description of Artificial Sequence: Synthetic polypeptide
EIVLTQSPGTLSLSPGDRATLSCRASQSVSSIYLAWYQQKPGQAPRLLIHGASTRATGIPDRFSGSGSGTDFTLTISRLEPEDFAVYYCQQRAHSPYTFGQGTKLEIK

SEQ ID NO: 1115 - DNA, 21 bp, synthetic construct
  misc_feature 1..21: note = Description of Artificial Sequence: Synthetic oligonucleotide
  source 1..21: mol_type = other DNA
cagagtgtcagcagcatctac

SEQ ID NO: 1116 - protein, 7 aa, synthetic construct
  REGION 1..7: note = Description of Artificial Sequence: Synthetic peptide
QSVSSIY

SEQ ID NO: 1117-1118 - skipped (2 entries)

SEQ ID NO: 1119 - DNA, 27 bp, synthetic construct
  misc_feature 1..27: note = Description of Artificial Sequence: Synthetic oligonucleotide
  source 1..27: mol_type = other DNA
cagcagcgtgctcactcaccgtacact

SEQ ID NO: 1120 - protein, 9 aa, synthetic construct
  REGION 1..9: note = Description of Artificial Sequence: Synthetic peptide
QQRAHSPYT

SEQ ID NO: 1121 - DNA, 369 bp, synthetic construct
  misc_feature 1..369: note = Description of Artificial Sequence: Synthetic polynucleotide
  source 1..369: mol_type = other DNA
gaagtgcagctggtggagtctgggggaggcttggtacagcctggcaggtccctgagactctcctgtgcagcctctggcttcagctttgataattatgccatgcactgggtccggcaagctccaggacagggcctggagtgggtctcaggtattagttggaatagtggtagcagagactatgcggactctgtgaagggccgattcaccatctccagagacaatgccaggaactccctgtttctgcaaatgaacagtctgagtaatgaggacacggccatgtattactgcgcaaaagataagagtggctacggctcctacttctacggtatggacgtctggggccaagggaccacggtcaccgtctcctca

SEQ ID NO: 1122 - protein, 123 aa, synthetic construct
  REGION 1..123: note = Description of Artificial Sequence: Synthetic polypeptide
EVQLVESGGGLVQPGRSLRLSCAASGFSFDNYAMHWVRQAPGQGLEWVSGISWNSGSRDYADSVKGRFTISRDNARNSLFLQMNSLSNEDTAMYYCAKDKSGYGSYFYGMDVWGQGTTVTVSS

SEQ ID NO: 1123 - DNA, 24 bp, synthetic construct
  misc_feature 1..24: note = Description of Artificial Sequence: Synthetic oligonucleotide
  source 1..24: mol_type = other DNA
ggcttcagctttgataattatgcc

SEQ ID NO: 1124 - protein, 8 aa, synthetic construct
  REGION 1..8: note = Description of Artificial Sequence: Synthetic peptide
GFSFDNYA

SEQ ID NO: 1125 - DNA, 24 bp, synthetic construct
  misc_feature 1..24: note = Description of Artificial Sequence: Synthetic oligonucleotide
  source 1..24: mol_type = other DNA
attagttggaatagtggtagcaga

SEQ ID NO: 1126 - protein, 8 aa, synthetic construct
  REGION 1..8: note = Description of Artificial Sequence: Synthetic peptide
ISWNSGSR

SEQ ID NO: 1127 - DNA, 48 bp, synthetic construct
  misc_feature 1..48: note = Description of Artificial Sequence: Synthetic oligonucleotide
  source 1..48: mol_type = other DNA
gcaaaagataagagtggctacggctcctacttctacggtatggacgtc

SEQ ID NO: 1128 - protein, 16 aa, synthetic construct
  REGION 1..16: note = Description of Artificial Sequence: Synthetic peptide
AKDKSGYGSYFYGMDV

SEQ ID NO: 1129 - DNA, 324 bp, synthetic construct
  misc_feature 1..324: note = Description of Artificial Sequence: Synthetic polynucleotide
  source 1..324: mol_type = other DNA
gaaattgtgttgacgcagtctccaggcaccctgtctttgtctccaggggacagagccaccctctcctgcagggccagtcagagtattagaaacatctatttagcctggtaccagcagaaacctggccaggctcccaggctcctcatccatggtgcgtccaccagggccactggcatcccagacaggttcagtggcagtgggtcagggacagacttcactctcaccatcagcagactggagcctgaagattttgcagtttattactgtcagcagcgtgttagtttaccgtacacttttggccaggggaccaagctggagatcaaa

SEQ ID NO: 1130 - protein, 108 aa, synthetic construct
  REGION 1..108: note = Description of Artificial Sequence: Synthetic polypeptide
EIVLTQSPGTLSLSPGDRATLSCRASQSIRNIYLAWYQQKPGQAPRLLIHGASTRATGIPDRFSGSGSGTDFTLTISRLEPEDFAVYYCQQRVSLPYTFGQGTKLEIK

SEQ ID NO: 1131 - DNA, 21 bp, synthetic construct
  misc_feature 1..21: note = Description of Artificial Sequence: Synthetic oligonucleotide
  source 1..21: mol_type = other DNA
cagagtattagaaacatctat

SEQ ID NO: 1132 - protein, 7 aa, synthetic construct
  REGION 1..7: note = Description of Artificial Sequence: Synthetic peptide
QSIRNIY

SEQ ID NO: 1133-1134 - skipped (2 entries)

SEQ ID NO: 1135 - DNA, 27 bp, synthetic construct
  misc_feature 1..27: note = Description of Artificial Sequence: Synthetic oligonucleotide
  source 1..27: mol_type = other DNA
cagcagcgtgttagtttaccgtacact

SEQ ID NO: 1136 - protein, 9 aa, synthetic construct
  REGION 1..9: note = Description of Artificial Sequence: Synthetic peptide
QQRVSLPYT

SEQ ID NO: 1137 - DNA, 369 bp, synthetic construct
  misc_feature 1..369: note = Description of Artificial Sequence: Synthetic polynucleotide
  source 1..369: mol_type = other DNA
caggtgcagctggtggagtctgggggaggcttggtacagcctggcaggtccctgagactctcctgtgcagcctctggcttcagctttgatgattatgccatgcactgggtccggcaagctccaggacagggcctggagtgggtctcaggtattagttggaatggtggtagcagagactatgcggactctgtgaagggccgattcaccatctccagagacaacgccaggaactccctgtttctgcaaatgaacagtctgtttactgaggacacggccttgtattactgtgcaaaagataagagtggctacggctcctacttctacggtatggacgtctggggccaagggaccacggtcaccgtctcctca

SEQ ID NO: 1138 - protein, 123 aa, synthetic construct
  REGION 1..123: note = Description of Artificial Sequence: Synthetic polypeptide
QVQLVESGGGLVQPGRSLRLSCAASGFSFDDYAMHWVRQAPGQGLEWVSGISWNGGSRDYADSVKGRFTISRDNARNSLFLQMNSLFTEDTALYYCAKDKSGYGSYFYGMDVWGQGTTVTVSS

SEQ ID NO: 1139 - DNA, 24 bp, synthetic construct
  misc_feature 1..24: note = Description of Artificial Sequence: Synthetic oligonucleotide
  source 1..24: mol_type = other DNA
ggcttcagctttgatgattatgcc

SEQ ID NO: 1140 - protein, 8 aa, synthetic construct
  REGION 1..8: note = Description of Artificial Sequence: Synthetic peptide
GFSFDDYA

SEQ ID NO: 1141 - DNA, 24 bp, synthetic construct
  misc_feature 1..24: note = Description of Artificial Sequence: Synthetic oligonucleotide
  source 1..24: mol_type = other DNA
attagttggaatggtggtagcaga

SEQ ID NO: 1142 - protein, 8 aa, synthetic construct
  REGION 1..8: note = Description of Artificial Sequence: Synthetic peptide
ISWNGGSR

SEQ ID NO: 1143 - DNA, 48 bp, synthetic construct; identical to SEQ ID NO: 1127
  misc_feature 1..48: note = Description of Artificial Sequence: Synthetic oligonucleotide
  source 1..48: mol_type = other DNA

SEQ ID NO: 1144 - protein, 16 aa, synthetic construct
  REGION 1..16: note = Description of Artificial Sequence: Synthetic peptide
AKDKSGYGSYFYGMDV

SEQ ID NO: 1145 - DNA, 324 bp, synthetic construct
  misc_feature 1..324: note = Description of Artificial Sequence: Synthetic polynucleotide
  source 1..324: mol_type = other DNA
gaaattgtgttgacgcagtctccaggcattctgtctttgtctccaggggacagagccaccctctcctgcagggccagtcagagtattagaaacatctatttagcctggtaccagcagaaacctggccaggctcccaggctcctcatccatggtgcgtccaccagggccactggcatcccagacaggttcagtggcagtgggtcagggacagacttcactctcaccatcagcagactggagcctgaagattttgcagtttattactgtcagcagcgtgttagttcaccgtacacttttggccaggggaccaagctggagatcaaa

SEQ ID NO: 1146 - protein, 108 aa, synthetic construct
  REGION 1..108: note = Description of Artificial Sequence: Synthetic polypeptide
EIVLTQSPGILSLSPGDRATLSCRASQSIRNIYLAWYQQKPGQAPRLLIHGASTRATGIPDRFSGSGSGTDFTLTISRLEPEDFAVYYCQQRVSSPYTFGQGTKLEIK

SEQ ID NO: 1147 - DNA, 21 bp, synthetic construct
  misc_feature 1..21: note = Description of Artificial Sequence: Synthetic oligonucleotide
  source 1..21: mol_type = other DNA
cagagtattagaaacatctat

SEQ ID NO: 1148 - protein, 7 aa, synthetic construct
  REGION 1..7: note = Description of Artificial Sequence: Synthetic peptide
QSIRNIY

SEQ ID NO: 1149-1150 - skipped (2 entries)

SEQ ID NO: 1151 - DNA, 27 bp, synthetic construct
  misc_feature 1..27: note = Description of Artificial Sequence: Synthetic oligonucleotide
  source 1..27: mol_type = other DNA
cagcagcgtgttagttcaccgtacact

SEQ ID NO: 1152 - protein, 9 aa, synthetic construct
  REGION 1..9: note = Description of Artificial Sequence: Synthetic peptide
QQRVSSPYT

SEQ ID NO: 1153 - DNA, 369 bp, synthetic construct
  misc_feature 1..369: note = Description of Artificial Sequence: Synthetic polynucleotide
  source 1..369: mol_type = other DNA
gaggtgcagctggtggagtctgggggaggcttggtacagcctggcaggtccctgagactctcctgtgcagcctctggattcacctttgatgattatgccatgcactgggtccggcaagctccaggaaagggcctggagtgggtctcaggtattagttggaatagtggtagcagagactatgcggactctgtgaagggccgattcaccatctccagagacaacgccaggaactccctgtttctgcaaatgaacagtctgagtactgaggacacggccttgtattactgtgcaaaagataagagtggctacggctcctactactacggtatggacgtctggggccaagggaccacggtcaccgtctcctca

SEQ ID NO: 1154 - protein, 123 aa, synthetic construct
  REGION 1..123: note = Description of Artificial Sequence: Synthetic polypeptide
EVQLVESGGGLVQPGRSLRLSCAASGFTFDDYAMHWVRQAPGKGLEWVSGISWNSGSRDYADSVKGRFTISRDNARNSLFLQMNSLSTEDTALYYCAKDKSGYGSYYYGMDVWGQGTTVTVSS

SEQ ID NO: 1155 - DNA, 24 bp, synthetic construct
  misc_feature 1..24: note = Description of Artificial Sequence: Synthetic oligonucleotide
  source 1..24: mol_type = other DNA
ggattcacctttgatgattatgcc

SEQ ID NO: 1156 - protein, 8 aa, synthetic construct
  REGION 1..8: note = Description of Artificial Sequence: Synthetic peptide
GFTFDDYA

SEQ ID NO: 1157 - DNA, 24 bp, synthetic construct
  misc_feature 1..24: note = Description of Artificial Sequence: Synthetic oligonucleotide
  source 1..24: mol_type = other DNA
attagttggaatagtggtagcaga

SEQ ID NO: 1158 - protein, 8 aa, synthetic construct
  REGION 1..8: note = Description of Artificial Sequence: Synthetic peptide
ISWNSGSR

SEQ ID NO: 1159 - DNA, 48 bp, synthetic construct
  misc_feature 1..48: note = Description of Artificial Sequence: Synthetic oligonucleotide
  source 1..48: mol_type = other DNA
gcaaaagataagagtggctacggctcctactactacggtatggacgtc

SEQ ID NO: 1160 - protein, 16 aa, synthetic construct
  REGION 1..16: note = Description of Artificial Sequence: Synthetic peptide
AKDKSGYGSYYYGMDV

SEQ ID NO: 1161 - DNA, 324 bp, synthetic construct
  misc_feature 1..324: note = Description of Artificial Sequence: Synthetic polynucleotide
  source 1..324: mol_type = other DNA
gaaattgtgttgacgcagtctccaggcaccctgtctttgtctccaggggacagagccaccctctcctgcagggccagtcagagtattagaagcatctacttagcctggtaccagcagaaacctggccaggctcccaggctcctcatccatggtgcgtccaccagggccactggcatcccagacaggttcagtggcagtgggtcagggacagacttcactctcaccatcagcagactggagcctgaagattttgcagtttattactgtcagcagcgtgttagctcaccgtacacttttggccaggggaccaagctggagatcaaa

SEQ ID NO: 1162 - protein, 108 aa, synthetic construct
  REGION 1..108: note = Description of Artificial Sequence: Synthetic polypeptide
EIVLTQSPGTLSLSPGDRATLSCRASQSIRSIYLAWYQQKPGQAPRLLIHGASTRATGIPDRFSGSGSGTDFTLTISRLEPEDFAVYYCQQRVSSPYTFGQGTKLEIK

SEQ ID NO: 1163 - DNA, 21 bp, synthetic construct
  misc_feature 1..21: note = Description of Artificial Sequence: Synthetic oligonucleotide
  source 1..21: mol_type = other DNA
cagagtattagaagcatctac

SEQ ID NO: 1164 - protein, 7 aa, synthetic construct
  REGION 1..7: note = Description of Artificial Sequence: Synthetic peptide
QSIRSIY

SEQ ID NO: 1165-1166 - skipped (2 entries)

SEQ ID NO: 1167 - DNA, 27 bp, synthetic construct
  misc_feature 1..27: note = Description of Artificial Sequence: Synthetic oligonucleotide
  source 1..27: mol_type = other DNA
cagcagcgtgttagctcaccgtacact

SEQ ID NO: 1168 - protein, 9 aa, synthetic construct
  REGION 1..9: note = Description of Artificial Sequence: Synthetic peptide
QQRVSSPYT

SEQ ID NO: 1169 - DNA, 369 bp, synthetic construct
  misc_feature 1..369: note = Description of Artificial Sequence: Synthetic polynucleotide
  source 1..369: mol_type = other DNA
gaagtgcagctggtggagtctgggggaggcttggtacagcctggcaggtccctgagactctcctgtgtagcctctggattcacctttgctgattttaccatgcactgggtccggcaagcgccagggaagggccttgagtgggtctcaggtattagttggaatagtaatagtatagactatgcggactctgtgaagggccgattcaccatctccagagacaacgccaagaaatccctgtttctgcaaatgtccagtctgagagctgaggacacggccttatattactgtgtcaaagacagaagcggatatagcagattctactacggtatggacgtctggggccaagggaccacggtcaccgtctcctca

SEQ ID NO: 1170 - protein, 123 aa, synthetic construct
  REGION 1..123: note = Description of Artificial Sequence: Synthetic polypeptide
EVQLVESGGGLVQPGRSLRLSCVASGFTFADFTMHWVRQAPGKGLEWVSGISWNSNSIDYADSVKGRFTISRDNAKKSLFLQMSSLRAEDTALYYCVKDRSGYSRFYYGMDVWGQGTTVTVSS

SEQ ID NO: 1171 - DNA, 24 bp, synthetic construct
  misc_feature 1..24: note = Description of Artificial Sequence: Synthetic oligonucleotide
  source 1..24: mol_type = other DNA
ggattcacctttgctgattttacc

SEQ ID NO: 1172 - protein, 8 aa, synthetic construct
  REGION 1..8: note = Description of Artificial Sequence: Synthetic peptide
GFTFADFT

SEQ ID NO: 1173 - DNA, 24 bp, synthetic construct
  misc_feature 1..24: note = Description of Artificial Sequence: Synthetic oligonucleotide
  source 1..24: mol_type = other DNA
attagttggaatagtaatagtata

SEQ ID NO: 1174 - protein, 8 aa, synthetic construct
  REGION 1..8: note = Description of Artificial Sequence: Synthetic peptide
ISWNSNSI

SEQ ID NO: 1175 - DNA, 48 bp, synthetic construct
  misc_feature 1..48: note = Description of Artificial Sequence: Synthetic oligonucleotide
  source 1..48: mol_type = other DNA
gtcaaagacagaagcggatatagcagattctactacggtatggacgtc

SEQ ID NO: 1176 - protein, 16 aa, synthetic construct
  REGION 1..16: note = Description of Artificial Sequence: Synthetic peptide
VKDRSGYSRFYYGMDV

SEQ ID NO: 1177 - DNA, 321 bp, synthetic construct
  misc_feature 1..321: note = Description of Artificial Sequence: Synthetic polynucleotide
  source 1..321: mol_type = other DNA
gaaattgtgatgacgcagtctccagccaccctgtctgtgtctccaggggaaagagccatcctctcctgcagggccagtcagaatattaatagcaacttggcctggtaccagcagaaacctggccaggctcccaggctcctcatctatggtgcatccaccagggccactggtgtcccagccaggttcagtggcagtgggtctgggacagagttcactctcaccatccgcagcctgcaatctgaagattttgcagtttattactgtcaacaatattataattggccgatcactttcggccacgggacacgactggagattaaa

SEQ ID NO: 1178 - protein, 107 aa, synthetic construct
  REGION 1..107: note = Description of Artificial Sequence: Synthetic polypeptide
EIVMTQSPATLSVSPGERAILSCRASQNINSNLAWYQQKPGQAPRLLIYGASTRATGVPARFSGSGSGTEFTLTIRSLQSEDFAVYYCQQYYNWPITFGHGTRLEIK

SEQ ID NO: 1179 - DNA, 18 bp, synthetic construct
  misc_feature 1..18: note = Description of Artificial Sequence: Synthetic oligonucleotide
  source 1..18: mol_type = other DNA
cagaatattaatagcaac

SEQ ID NO: 1180 - protein, 6 aa, synthetic construct
  REGION 1..6: note = Description of Artificial Sequence: Synthetic peptide
QNINSN

SEQ ID NO: 1181-1182 - skipped (2 entries)

SEQ ID NO: 1183 - DNA, 27 bp, synthetic construct
  misc_feature 1..27: note = Description of Artificial Sequence: Synthetic oligonucleotide
  source 1..27: mol_type = other DNA
caacaatattataattggccgatcact

SEQ ID NO: 1184 - protein, 9 aa, synthetic construct
  REGION 1..9: note = Description of Artificial Sequence: Synthetic peptide
QQYYNWPIT

SEQ ID NO: 1185 - DNA, 369 bp, synthetic construct
  misc_feature 1..369: note = Description of Artificial Sequence: Synthetic polynucleotide
  source 1..369: mol_type = other DNA
gaggtgcagctggtggagtctgggggaggcttggtacagcctggcaggtccctgagactctcctgtgcagcctctggattcacctttgatgattatgccatgcactgggtccggcaagctccaggaaagggcctggagtgggtctcaggtattagttggaatggtggtagtaaagactatgcggactctgtgaagggccgattcaccatctccagagacaacaccaggaactccctgtctctgcaaatgaacagtctgagaattgaagacacggccttatattactgtgcaaaagataagagtggctacggctccttctactacggtttggacgtctggggccaagggaccacggtcaccgtctcctca

SEQ ID NO: 1186 - protein, 123 aa, synthetic construct
  REGION 1..123: note = Description of Artificial Sequence: Synthetic polypeptide
EVQLVESGGGLVQPGRSLRLSCAASGFTFDDYAMHWVRQAPGKGLEWVSGISWNGGSKDYADSVKGRFTISRDNTRNSLSLQMNSLRIEDTALYYCAKDKSGYGSFYYGLDVWGQGTTVTVSS

SEQ ID NO: 1187 - DNA, 24 bp, synthetic construct
  misc_feature 1..24: note = Description of Artificial Sequence: Synthetic oligonucleotide
  source 1..24: mol_type = other DNA
ggattcacctttgatgattatgcc

SEQ ID NO: 1188 - protein, 8 aa, synthetic construct
  REGION 1..8: note = Description of Artificial Sequence: Synthetic peptide
GFTFDDYA

SEQ ID NO: 1189 - DNA, 24 bp, synthetic construct
  misc_feature 1..24: note = Description of Artificial Sequence: Synthetic oligonucleotide
  source 1..24: mol_type = other DNA
attagttggaatggtggtagtaaa

SEQ ID NO: 1190 - protein, 8 aa, synthetic construct
  REGION 1..8: note = Description of Artificial Sequence: Synthetic peptide
ISWNGGSK

SEQ ID NO: 1191 - DNA, 48 bp, synthetic construct
  misc_feature 1..48: note = Description of Artificial Sequence: Synthetic oligonucleotide
  source 1..48: mol_type = other DNA
gcaaaagataagagtggctacggctccttctactacggtttggacgtc

SEQ ID NO: 1192 - protein, 16 aa, synthetic construct
  REGION 1..16: note = Description of Artificial Sequence: Synthetic peptide
AKDKSGYGSFYYGLDV

SEQ ID NO: 1193 - DNA, 324 bp, synthetic construct
  misc_feature 1..324: note = Description of Artificial Sequence: Synthetic polynucleotide
  source 1..324: mol_type = other DNA
gaaatagtgttgacacagtctccaggcaccctgtctttgtctccaggggacagagccaccctctcctgcagggccagtcagagtattagaagcatctacttagcctggtaccagcagaaacctggccaggctcccaggctcctcatccatggtgcgtccaccagggccactggcatcccagacaggttcagtggcagtgggtcagggacagacttcactctcaccatcagcagactggagcctgaagattttgcagtttattactgtcagcagcgtgttagctcaccgtacacttttggccaggggaccaagctggagatcaaa

SEQ ID NO: 1194 - protein, 108 aa, synthetic construct; identical to SEQ ID NO: 1162
  REGION 1..108: note = Description of Artificial Sequence: Synthetic polypeptide

SEQ ID NO: 1195 - DNA, 21 bp, synthetic construct
  misc_feature 1..21: note = Description of Artificial Sequence: Synthetic oligonucleotide
  source 1..21: mol_type = other DNA
cagagtattagaagcatctac

SEQ ID NO: 1196 - protein, 7 aa, synthetic construct
  REGION 1..7: note = Description of Artificial Sequence: Synthetic peptide
QSIRSIY

SEQ ID NO: 1197-1198 - skipped (2 entries)

SEQ ID NO: 1199 - DNA, 27 bp, synthetic construct
  misc_feature 1..27: note = Description of Artificial Sequence: Synthetic oligonucleotide
  source 1..27: mol_type = other DNA
cagcagcgtgttagctcaccgtacact

SEQ ID NO: 1200 - protein, 9 aa, synthetic construct
  REGION 1..9: note = Description of Artificial Sequence: Synthetic peptide
QQRVSSPYT

SEQ ID NO: 1201 - DNA, 369 bp, synthetic construct
  misc_feature 1..369: note = Description of Artificial Sequence: Synthetic polynucleotide
  source 1..369: mol_type = other DNA
gaggtgcagctggtggagtctgggggaggcttggtacagcctggcaggtccctgagactctcctgtgcagcctctggattcacctttgatgatttcaccatgcactgggtccggcaagctccaggaaagggcctggagtgggtctcagatattagttggaatagtggtagcatagactatgcggactctgtgaagggccgattcaccatttccagagacaatgccaggaactccctgtttctacaaatgagcagtctgagaactgaggacacggcctcgtattactgtataaaagataagagtggctacggctcctacaactacggtctggacgtctggggccaagggaccacggtcaccgtctcctca

SEQ ID NO: 1202 - protein, 123 aa, synthetic construct
  REGION 1..123: note = Description of Artificial Sequence: Synthetic polypeptide
EVQLVESGGGLVQPGRSLRLSCAASGFTFDDFTMHWVRQAPGKGLEWVSDISWNSGSIDYADSVKGRFTISRDNARNSLFLQMSSLRTEDTASYYCIKDKSGYGSYNYGLDVWGQGTTVTVSS

SEQ ID NO: 1203 - DNA, 24 bp, synthetic construct
  misc_feature 1..24: note = Description of Artificial Sequence: Synthetic oligonucleotide
  source 1..24: mol_type = other DNA
ggattcacctttgatgatttcacc

SEQ ID NO: 1204 - protein, 8 aa, synthetic construct
  REGION 1..8: note = Description of Artificial Sequence: Synthetic peptide
GFTFDDFT

SEQ ID NO: 1205 - DNA, 24 bp, synthetic construct
  misc_feature 1..24: note = Description of Artificial Sequence: Synthetic oligonucleotide
  source 1..24: mol_type = other DNA
attagttggaatagtggtagcata

SEQ ID NO: 1206 - protein, 8 aa, synthetic construct
  REGION 1..8: note = Description of Artificial Sequence: Synthetic peptide
ISWNSGSI

SEQ ID NO: 1207 - DNA, 48 bp, synthetic construct
  misc_feature 1..48: note = Description of Artificial Sequence: Synthetic oligonucleotide
  source 1..48: mol_type = other DNA
ataaaagataagagtggctacggctcctacaactacggtctggacgtc

SEQ ID NO: 1208 - protein, 16 aa, synthetic construct
  REGION 1..16: note = Description of Artificial Sequence: Synthetic peptide
IKDKSGYGSYNYGLDV

SEQ ID NO: 1209 - DNA, 324 bp, synthetic construct
  misc_feature 1..324: note = Description of Artificial Sequence: Synthetic polynucleotide
  source 1..324: mol_type = other DNA
gaaattgtgttgacgcagtctccaggcaccctgtctttgtctccaggggacagagccaccctctcctgcagggccagtcagagtgttagcagcatctacttagcctggtaccagcagaaacctggccaggctcccaggctcctcatccatggtgcgtccaccagggccactggcatcccagacaggttcagtggcagtgggtcggggacagacttcactctcaccatcagcagactggagcctgaagattttgcactttattactgtcaccagcgtgttagttcaccgtacacttttggccaggggaccaagctggagatcaaa

SEQ ID NO: 1210 - protein, 108 aa, synthetic construct
  REGION 1..108: note = Description of Artificial Sequence: Synthetic polypeptide
EIVLTQSPGTLSLSPGDRATLSCRASQSVSSIYLAWYQQKPGQAPRLLIHGASTRATGIPDRFSGSGSGTDFTLTISRLEPEDFALYYCHQRVSSPYTFGQGTKLEIK

SEQ ID NO: 1211 - DNA, 21 bp, synthetic construct
  misc_feature 1..21: note = Description of Artificial Sequence: Synthetic oligonucleotide
  source 1..21: mol_type = other DNA
cagagtgttagcagcatctac

SEQ ID NO: 1212 - protein, 7 aa, synthetic construct
  REGION 1..7: note = Description of Artificial Sequence: Synthetic peptide
QSVSSIY

SEQ ID NO: 1213-1214 - skipped (2 entries)

SEQ ID NO: 1215 - DNA, 27 bp, synthetic construct
  misc_feature 1..27: note = Description of Artificial Sequence: Synthetic oligonucleotide
  source 1..27: mol_type = other DNA
caccagcgtgttagttcaccgtacact

SEQ ID NO: 1216 - protein, 9 aa, synthetic construct
  REGION 1..9: note = Description of Artificial Sequence: Synthetic peptide
HQRVSSPYT

SEQ ID NO: 1217 - DNA, 369 bp, synthetic construct
  misc_feature 1..369: note = Description of Artificial Sequence: Synthetic polynucleotide
  source 1..369: mol_type = other DNA
gaggtgcagctggtggagtctgggggaggcttggtacagcctggcaggtccctgagactctcctgtgcagcctctggattcacctttgatgattatgccatgcactgggtccggcaagctccaggaaagggcctggagtgggtctcaggtattagttggaatagtggtagtaaagactatgcggactctgtgaagggccgattcaccatctccagagacaacaccaggaactccctgtttctgcaaatgaacagtctgagaactgaagacacggccttatattactgtgcaaaagataagagtggctacggctccttctactacggtatggacgtctggggccaagggaccacggtcaccgtctcctca

SEQ ID NO: 1218 - protein, 123 aa, synthetic construct
  REGION 1..123: note = Description of Artificial Sequence: Synthetic polypeptide
EVQLVESGGGLVQPGRSLRLSCAASGFTFDDYAMHWVRQAPGKGLEWVSGISWNSGSKDYADSVKGRFTISRDNTRNSLFLQMNSLRTEDTALYYCAKDKSGYGSFYYGMDVWGQGTTVTVSS

SEQ ID NO: 1219 - DNA, 24 bp, synthetic construct
  misc_feature 1..24: note = Description of Artificial Sequence: Synthetic oligonucleotide
  source 1..24: mol_type = other DNA
ggattcacctttgatgattatgcc

SEQ ID NO: 1220 - protein, 8 aa, synthetic construct
  REGION 1..8: note = Description of Artificial Sequence: Synthetic peptide
GFTFDDYA

SEQ ID NO: 1221 - DNA, 24 bp, synthetic construct
  misc_feature 1..24: note = Description of Artificial Sequence: Synthetic oligonucleotide
  source 1..24: mol_type = other DNA
attagttggaatagtggtagtaaa

SEQ ID NO: 1222 - protein, 8 aa, synthetic construct
  REGION 1..8: note = Description of Artificial Sequence: Synthetic peptide
ISWNSGSK

SEQ ID NO: 1223 - DNA, 48 bp, synthetic construct; identical to SEQ ID NO: 1111
  misc_feature 1..48: note = Description of Artificial Sequence: Synthetic oligonucleotide
  source 1..48: mol_type = other DNA

SEQ ID NO: 1224 - protein, 16 aa, synthetic construct
  REGION 1..16: note = Description of Artificial Sequence: Synthetic peptide
AKDKSGYGSFYYGMDV

SEQ ID NO: 1225 - DNA, 318 bp, synthetic construct
  misc_feature 1..318: note = Description of Artificial Sequence: Synthetic polynucleotide
  source 1..318: mol_type = other DNA
gacatccagatgacccagtctccttccaccctgtctgcatctgtaggagacagagtcaccatcacttgccgggccagtcagagtattagtagctggttggcctggtatcagcagaaaccagggaaagcccctaagctcctgatctataaggcgtctagtttagaaagtggggtcccatcaaggttcagcggcagtggatctgggacagaattcactctcaccatcagcagcctgcagcctgatgattttgcaacttattactgccaacagtataatagttattctccgttcggccaagggaccaaggtggaaatcaaa

SEQ ID NO: 1226 - protein, 106 aa, synthetic construct
  REGION 1..106: note = Description of Artificial Sequence: Synthetic polypeptide
DIQMTQSPSTLSASVGDRVTITCRASQSISSWLAWYQQKPGKAPKLLIYKASSLESGVPSRFSGSGSGTEFTLTISSLQPDDFATYYCQQYNSYSPFGQGTKVEIK

SEQ ID NO: 1227 - DNA, 18 bp, synthetic construct
  misc_feature 1..18: note = Description of Artificial Sequence: Synthetic oligonucleotide
  source 1..18: mol_type = other DNA
cagagtattagtagctgg

SEQ ID NO: 1228 - protein, 6 aa, synthetic construct
  REGION 1..6: note = Description of Artificial Sequence: Synthetic peptide
QSISSW

SEQ ID NO: 1229-1230 - skipped (2 entries)

SEQ ID NO: 1231 - DNA, 24 bp, synthetic construct
  misc_feature 1..24: note = Description of Artificial Sequence: Synthetic oligonucleotide
  source 1..24: mol_type = other DNA
caacagtataatagttattctccg

SEQ ID NO: 1232 - protein, 8 aa, synthetic construct
  REGION 1..8: note = Description of Artificial Sequence: Synthetic peptide
QQYNSYSP

SEQ ID NO: 1233 - DNA, 372 bp, synthetic construct
  misc_feature 1..372: note = Description of Artificial Sequence: Synthetic polynucleotide
  source 1..372: mol_type = other DNA
caggtgcaactggtggagtctgggggaggcgtggtccagcctgggaggtccctgagactctcctgtgcagcctctggactcaccttcagtacctatgtcatgcactgggtccgccaggctccaggcaaggggctggcgtgggtggcagttatagcaaatgatggaagtaataaatattatgcagactccgtgaagggccgattcaccatctccagagacaactccaagaacacgctgtatctgcaaatgaatagcctgagacctgaggacacggctgtgtatttttgtgcgaaagaggggggtaccagtgggtcctactattactatggaatggacgtctggggtcaagggactacggtcaccgtctcctca

SEQ ID NO: 1234 - protein, 124 aa, synthetic construct
  REGION 1..124: note = Description of Artificial Sequence: Synthetic polypeptide
QVQLVESGGGVVQPGRSLRLSCAASGLTFSTYVMHWVRQAPGKGLAWVAVIANDGSNKYYADSVKGRFTISRDNSKNTLYLQMNSLRPEDTAVYFCAKEGGTSGSYYYYGMDVWGQGTTVTVSS

SEQ ID NO: 1235 - DNA, 24 bp, synthetic construct
  misc_feature 1..24: note = Description of Artificial Sequence: Synthetic oligonucleotide
  source 1..24: mol_type = other DNA
ggactcaccttcagtacctatgtc

SEQ ID NO: 1236 - protein, 8 aa, synthetic construct
  REGION 1..8: note = Description of Artificial Sequence: Synthetic peptide
GLTFSTYV

SEQ ID NO: 1237 - DNA, 24 bp, synthetic construct
  misc_feature 1..24: note = Description of Artificial Sequence: Synthetic oligonucleotide
  source 1..24: mol_type = other DNA
atagcaaatgatggaagtaataaa

SEQ ID NO: 1238 - protein, 8 aa, synthetic construct
  REGION 1..8: note = Description of Artificial Sequence: Synthetic peptide
IANDGSNK

SEQ ID NO: 1239 - DNA, 51 bp, synthetic construct
  misc_feature 1..51: note = Description of Artificial Sequence: Synthetic oligonucleotide
  source 1..51: mol_type = other DNA
gcgaaagaggggggtaccagtgggtcctactattactatggaatggacgtc

SEQ ID NO: 1240 - protein, 17 aa, synthetic construct
  REGION 1..17: note = Description of Artificial Sequence: Synthetic peptide
AKEGGTSGSYYYYGMDV

SEQ ID NO: 1241 - DNA, 342 bp, synthetic construct
  misc_feature 1..342: note = Description of Artificial Sequence: Synthetic polynucleotide
  source 1..342: mol_type = other DNA
gacatccagatgacccagtctccagactccctggctgtgtctctgggcgagagggccaccatcaactgcaagtccagccagagtcttttattcaactccatcaataagaactacttagcttggtaccagcagaaaccaggacagcctcctaagcttctcctttactgggcatctacccgggaatccgggatccctgaccgattcagtggcagcgggtctgggacagatttcactctcaccatcaccagcctgcaggctgaagatgtggcactttattactgtcagcaatattatagtattccgtggacgttcggccaagggaccaaggtggaaatcaaacga

SEQ ID NO: 1242 - protein, 114 aa, synthetic construct
  REGION 1..114: note = Description of Artificial Sequence: Synthetic polypeptide
DIQMTQSPDSLAVSLGERATINCKSSQSLLFNSINKNYLAWYQQKPGQPPKLLLYWASTRESGIPDRFSGSGSGTDFTLTITSLQAEDVALYYCQQYYSIPWTFGQGTKVEIKR

SEQ ID NO: 1243 - DNA, 36 bp, synthetic construct
  misc_feature 1..36: note = Description of Artificial Sequence: Synthetic oligonucleotide
  source 1..36: mol_type = other DNA
cagagtcttttattcaactccatcaataagaactac

SEQ ID NO: 1244 - protein, 12 aa, synthetic construct
  REGION 1..12: note = Description of Artificial Sequence: Synthetic peptide
QSLLFNSINKNY

SEQ ID NO: 1245-1246 - skipped (2 entries)

SEQ ID NO: 1247 - DNA, 27 bp, synthetic construct
  misc_feature 1..27: note = Description of Artificial Sequence: Synthetic oligonucleotide
  source 1..27: mol_type = other DNA
cagcaatattatagtattccgtggacg

SEQ ID NO: 1248 - protein, 9 aa, synthetic construct
  REGION 1..9: note = Description of Artificial Sequence: Synthetic peptide
QQYYSIPWT

SEQ ID NO: 1249 - DNA, 354 bp, synthetic construct
  misc_feature 1..354: note = Description of Artificial Sequence: Synthetic polynucleotide
  source 1..354: mol_type = other DNA
caggtgcagctggtggagtctggggctgaagtgaagaagcctggggcctcagtgaaggtctcctgcaagacttctggatacaccttcaccggctactatatgcactggatacgacaggcccctggacaagggcttgagtggatgggatggatcaaccctaaaagtggtggcacaaattatgcacagaagtttcagggcagggtcaccatgaccagggacacgtccatcagcacagcctacatggaactgagcaggctgagatccgacgacatggccgtgtattattgtgcgagaatgggggacggtgcagtgtttgacttctggggccagggaaccctggtcaccgtctcctca

SEQ ID NO: 1250 - protein, 118 aa, synthetic construct
  REGION 1..118: note = Description of Artificial Sequence: Synthetic polypeptide
QVQLVESGAEVKKPGASVKVSCKTSGYTFTGYYMHWIRQAPGQGLEWMGWINPKSGGTNYAQKFQGRVTMTRDTSISTAYMELSRLRSDDMAVYYCARMGDGAVFDFWGQGTLVTVSS

SEQ ID NO: 1251 - DNA, 24 bp, synthetic construct
  misc_feature 1..24: note = Description of Artificial Sequence: Synthetic oligonucleotide
  source 1..24: mol_type = other DNA
ggatacaccttcaccggctactat

SEQ ID NO: 1252 - protein, 8 aa, synthetic construct
  REGION 1..8: note = Description of Artificial Sequence: Synthetic peptide
GYTFTGYY

SEQ ID NO: 1253 - DNA, 24 bp, synthetic construct
  misc_feature 1..24: note = Description of Artificial Sequence: Synthetic oligonucleotide
  source 1..24: mol_type = other DNA
atcaaccctaaaagtggtggcaca

SEQ ID NO: 1254 - protein, 8 aa, synthetic construct
  REGION 1..8: note = Description of Artificial Sequence: Synthetic peptide
INPKSGGT

SEQ ID NO: 1255 - DNA, 33 bp, synthetic construct
  misc_feature 1..33: note = Description of Artificial Sequence: Synthetic oligonucleotide
  source 1..33: mol_type = other DNA
gcgagaatgggggacggtgcagtgtttgacttc

SEQ ID NO: 1256 - protein, 11 aa, synthetic construct
  REGION 1..11: note = Description of Artificial Sequence: Synthetic peptide
ARMGDGAVFDF

SEQ ID NO: 1257 - DNA, 324 bp, synthetic construct
  misc_feature 1..324: note = Description of Artificial Sequence: Synthetic polynucleotide
  source 1..324: mol_type = other DNA
gccatccagatgacccagtctccatcctccctgtctgcatctgtaggagacagagtcaccatcacttgccgggcaagtcagaggattagcagctttttaaattggtatcagcagaaaccagggaaagcccctaagctcctgatctatactgcatccaatttacaaaatggggtcccatcaaggttcagtggcagtggatctgggacagatttcactctcactatcagcagtctgcaacctgaagattttgctacttactactgtcaacagagttacaggaccccgctcactttcggcggagggaccaaggtggaaatcaaacga

SEQ ID NO: 1258 - protein, 108 aa, synthetic construct
  REGION 1..108: note = Description of Artificial Sequence: Synthetic polypeptide
AIQMTQSPSSLSASVGDRVTITCRASQRISSFLNWYQQKPGKAPKLLIYTASNLQNGVPSRFSGSGSGTDFTLTISSLQPEDFATYYCQQSYRTPLTFGGGTKVEIKR

SEQ ID NO: 1259 - DNA, 18 bp, synthetic construct
  misc_feature 1..18: note = Description of Artificial Sequence: Synthetic oligonucleotide
  source 1..18: mol_type = other DNA
cagaggattagcagcttt

SEQ ID NO: 1260 - protein, 6 aa, synthetic construct
  REGION 1..6: note = Description of Artificial Sequence: Synthetic peptide
QRISSF

SEQ ID NO: 1261-1262 - skipped (2 entries)

SEQ ID NO: 1263 - DNA, 27 bp, synthetic construct
  misc_feature 1..27: note = Description of Artificial Sequence: Synthetic oligonucleotide
  source 1..27: mol_type = other DNA
caacagagttacaggaccccgctcact

SEQ ID NO: 1264 - protein, 9 aa, synthetic construct
  REGION 1..9: note = Description of Artificial Sequence: Synthetic peptide
QQSYRTPLT

SEQ ID NO: 1265 - DNA, 369 bp, synthetic construct
  misc_feature 1..369: note = Description of Artificial Sequence: Synthetic polynucleotide
  source 1..369: mol_type = other DNA
gaggtgcagctggtggagtctgggggaggcttggtacagcctggcaggtccctgagactctcctgtgcagcctctggattcacctttgatgattataccatgcactgggtccggcaagctccagggaagggcctggagtgggtctcaggtattagttggaacagtggtagcataggctatgcggactctgtgaagggccgattcaccatttccagagacaacgccaagaactccctgtatttgcaaatgaacagtctgagagctgaggacacggccttgttttactgtgcaaaagatcaaagtggttacggccactactactacggtatggacgtctggggccaagggaccacggtcaccgtctcctca

SEQ ID NO: 1266 - protein, 123 aa, synthetic construct
  REGION 1..123: note = Description of Artificial Sequence: Synthetic polypeptide
EVQLVESGGGLVQPGRSLRLSCAASGFTFDDYTMHWVRQAPGKGLEWVSGISWNSGSIGYADSVKGRFTISRDNAKNSLYLQMNSLRAEDTALFYCAKDQSGYGHYYYGMDVWGQGTTVTVSS

SEQ ID NO: 1267 - DNA, 24 bp, synthetic construct
  misc_feature 1..24: note = Description of Artificial Sequence: Synthetic oligonucleotide
  source 1..24: mol_type = other DNA
ggattcacctttgatgattatacc

SEQ ID NO: 1268 - protein, 8 aa, synthetic construct
  REGION 1..8: note = Description of Artificial Sequence: Synthetic peptide
GFTFDDYT

SEQ ID NO: 1269 - DNA, 24 bp, synthetic construct
  misc_feature 1..24: note = Description of Artificial Sequence: Synthetic oligonucleotide
  source 1..24: mol_type = other DNA
attagttggaacagtggtagcata

SEQ ID NO: 1270 - protein, 8 aa, synthetic construct
  REGION 1..8: note = Description of Artificial Sequence: Synthetic peptide
ISWNSGSI

SEQ ID NO: 1271 - DNA, 48 bp, synthetic construct
  misc_feature 1..48: note = Description of Artificial Sequence: Synthetic oligonucleotide
  source 1..48: mol_type = other DNA
gcaaaagatcaaagtggttacggccactactactacggtatggacgtc

SEQ ID NO: 1272 - protein, 16 aa, synthetic construct
  REGION 1..16: note = Description of Artificial Sequence: Synthetic peptide
AKDQSGYGHYYYGMDV

SEQ ID NO: 1273 - DNA, 321 bp, synthetic construct
  misc_feature 1..321: note = Description of Artificial Sequence: Synthetic polynucleotide
  source 1..321: mol_type = other DNA
gaaatagtgatgacgcagtctccagccaccctgtctgtgtctccaggggaaagagccaccctctcctgtagggccagtcagagtgttagcagcaacttagcctggtaccagcagaaacctggccaggctcccaggctcctcatctatggtgcatccaccagggccactgatatcccagccaggttcagtggcagtgggtctgggacagagttcactctcaccatcagcagcctgcagtctgaagattttgcagtttatcactgtcagcagtataataactggccgctcactttcggcggagggaccaaggtggagatcaaa

SEQ ID NO: 1274 - protein, 107 aa, synthetic construct
  REGION 1..107: note = Description of Artificial Sequence: Synthetic polypeptide
EIVMTQSPATLSVSPGERATLSCRASQSVSSNLAWYQQKPGQAPRLLIYGASTRATDIPARFSGSGSGTEFTLTISSLQSEDFAVYHCQQYNNWPLTFGGGTKVEIK

SEQ ID NO: 1275 - DNA, 18 bp, synthetic construct
  misc_feature 1..18: note = Description of Artificial Sequence: Synthetic oligonucleotide
  source 1..18: mol_type = other DNA
cagagtgttagcagcaac

SEQ ID NO: 1276 - protein, 6 aa, synthetic construct
  REGION 1..6: note = Description of Artificial Sequence: Synthetic peptide
QSVSSN

SEQ ID NO: 1277-1278 - skipped (2 entries)

SEQ ID NO: 1279 - DNA, 27 bp, synthetic construct
  misc_feature 1..27: note = Description of Artificial Sequence: Synthetic oligonucleotide
  source 1..27: mol_type = other DNA
cagcagtataataactggccgctcact

SEQ ID NO: 1280 - protein, 9 aa, synthetic construct
  REGION 1..9: note = Description of Artificial Sequence: Synthetic peptide
QQYNNWPLT

SEQ ID NO: 1281 - DNA, 387 bp, synthetic construct
  misc_feature 1..387: note = Description of Artificial Sequence: Synthetic polynucleotide
  source 1..387: mol_type = other DNA
gaggtgcagctggtggagtctgggggaggcgtggtccagcctgggaggtccctgagactctcctgtgcagcctctggattcaccttcagttactatggcatgcactgggtccgccaggctccaggcaaggggctggagtgggtggcagttatatcatttgatggaaagaataaatattatgcagactccgtgatgggccgattcaccatctccagagacaattccaagaatacactgtatctgcaaatgaacagcctgagagctgaggactcggctgtgtttttctgtgcgaggtcttacgacattttgactggttatggagccggttacagctaccactacggtatggacgtctggggccaagggaccacggtcaccgtctcctca

SEQ ID NO: 1282 - protein, 129 aa, synthetic construct
  REGION 1..129: note = Description of Artificial Sequence: Synthetic polypeptide
EVQLVESGGGVVQPGRSLRLSCAASGFTFSYYGMHWVRQAPGKGLEWVAVISFDGKNKYYADSVMGRFTISRDNSKNTLYLQMNSLRAEDSAVFFCARSYDILTGYGAGYSYHYGMDVWGQGTTVTVSS

SEQ ID NO: 1283 - DNA, 24 bp, synthetic construct
  misc_feature 1..24: note = Description of Artificial Sequence: Synthetic oligonucleotide
  source 1..24: mol_type = other DNA
ggattcaccttcagttactatggc

SEQ ID NO: 1284 - protein, 8 aa, synthetic construct
  REGION 1..8: note = Description of Artificial Sequence: Synthetic peptide
GFTFSYYG

SEQ ID NO: 1285 - DNA, 24 bp, synthetic construct
  misc_feature 1..24: note = Description of Artificial Sequence: Synthetic oligonucleotide
  source 1..24: mol_type = other DNA
atatcatttgatggaaagaataaa

SEQ ID NO: 1286 - protein, 8 aa, synthetic construct
  REGION 1..8: note = Description of Artificial Sequence: Synthetic peptide
ISFDGKNK

SEQ ID NO: 1287 - DNA, 66 bp, synthetic construct
  misc_feature 1..66: note = Description of Artificial Sequence: Synthetic oligonucleotide
  source 1..66: mol_type = other DNA
gcgaggtcttacgacattttgactggttatggagccggttacagctaccactacggtatggacgtc

SEQ ID NO: 1288 - protein, 22 aa, synthetic construct
  REGION 1..22: note = Description of Artificial Sequence: Synthetic peptide
ARSYDILTGYGAGYSYHYGMDV

SEQ ID NO: 1289 - DNA, 324 bp, synthetic construct
  misc_feature 1..324: note = Description of Artificial Sequence: Synthetic polynucleotide
  source 1..324: mol_type = other DNA
gccatccagatgacccagtctccatcctccctgtctgcatctgtaggagacagagtcaccatcacttgccgggcaagtcagaggattagcagctttttaaattggtatcagcagaaaccagggaaagcccctaagctcctaatctatactgcatccaatttacaaaatggggtcccatcaaggttcagtggcagtggatctgggacagatttcactctcaccatcagcagtctgcaacctgaagattttgcaacttactactgtcaacagagttacaggaccccgctcactttcggcggagggaccaaggtggagatcaaacga

SEQ ID NO: 1290 - protein, 108 aa, synthetic construct; identical to SEQ ID NO: 1258
  REGION 1..108: note = Description of Artificial Sequence: Synthetic polypeptide

SEQ ID NO: 1291 - DNA, 18 bp, synthetic construct
  misc_feature 1..18: note = Description of Artificial Sequence: Synthetic oligonucleotide
  source 1..18: mol_type = other DNA
cagaggattagcagcttt

SEQ ID NO: 1292 - protein, 6 aa, synthetic construct
  REGION 1..6: note = Description of Artificial Sequence: Synthetic peptide
QRISSF

SEQ ID NO: 1293-1294 - skipped (2 entries)

SEQ ID NO: 1295 - DNA, 27 bp, synthetic construct
  misc_feature 1..27: note = Description of Artificial Sequence: Synthetic oligonucleotide
  source 1..27: mol_type = other DNA
caacagagttacaggaccccgctcact

SEQ ID NO: 1296 - protein, 9 aa, synthetic construct
  REGION 1..9: note = Description of Artificial Sequence: Synthetic peptide
QQSYRTPLT

SEQ ID NO: 1297 - DNA, 354 bp, synthetic construct
  misc_feature 1..354: note = Description of Artificial Sequence: Synthetic polynucleotide
  source 1..354: mol_type = other DNA
caggtgcagctggtggagtctggggctgaagtgaagaagcctggggcctcagtgaaggtctcctgcaagacttctggatacaccctctccggctattatatgcactggatgcgacaggcccctggacaagggcttgagtggatgggatggattaaccctaaaagtggtgtcacaaattatgcacagaagtttcaggacagagtcgccatgaccagggacacgtccatcagcacagcctacatggaactgagcaggctgagatctgacgacacggccgtgtattactgtgcgagaatgggggacggtgcagtgtttgacttctgggcccagggaaccctggtcaccgtctcctca

SEQ ID NO: 1298 - protein, 118 aa, synthetic construct
  REGION 1..118: note = Description of Artificial Sequence: Synthetic polypeptide
QVQLVESGAEVKKPGASVKVSCKTSGYTLSGYYMHWMRQAPGQGLEWMGWINPKSGVTNYAQKFQDRVAMTRDTSISTAYMELSRLRSDDTAVYYCARMGDGAVFDFWAQGTLVTVSS

SEQ ID NO: 1299 - DNA, 24 bp, synthetic construct
  misc_feature 1..24: note = Description of Artificial Sequence: Synthetic oligonucleotide
  source 1..24: mol_type = other DNA
ggatacaccctctccggctattat

SEQ ID NO: 1300 - protein, 8 aa, synthetic construct
  REGION 1..8: note = Description of Artificial Sequence: Synthetic peptide
GYTLSGYY

SEQ ID NO: 1301 - DNA, 24 bp, synthetic construct
  misc_feature 1..24: note = Description of Artificial Sequence: Synthetic oligonucleotide
  source 1..24: mol_type = other DNA
attaaccctaaaagtggtgtcaca

SEQ ID NO: 1302 - protein, 8 aa, synthetic construct
  REGION 1..8: note = Description of Artificial Sequence: Synthetic peptide
INPKSGVT

SEQ ID NO: 1303 - DNA, 33 bp, synthetic construct; identical to SEQ ID NO: 1255
  misc_feature 1..33: note = Description of Artificial Sequence: Synthetic oligonucleotide
  source 1..33: mol_type = other DNA

SEQ ID NO: 1304 - protein, 11 aa, synthetic construct
  REGION 1..11: note = Description of Artificial Sequence: Synthetic peptide
ARMGDGAVFDF

SEQ ID NO: 1305 - DNA, 324 bp, synthetic construct
  misc_feature 1..324: note = Description of Artificial Sequence: Synthetic polynucleotide
  source 1..324: mol_type = other DNA
gacatccagttgacccagtctccatcctccctgtctgcatctgtaggagacagagtcaccatcacttgccgggcaagtcagaggattagcagctttttaaattggtatcagcagaaaccagggaaagcccctaagctcctaatctatactgcatccaatttacaaaatggggtcccatcaaggttcagtggcagtggatctgggacagatttcactctcaccatcagcagtctgcaacctgaagattttgcaacttactactgtcaacagagttacaggaccccgctcactttcggcggagggaccaagctggagatcaaacga

SEQ ID NO: 1306 - protein, 108 aa, synthetic construct
  REGION 1..108: note = Description of Artificial Sequence: Synthetic polypeptide
DIQLTQSPSSLSASVGDRVTITCRASQRISSFLNWYQQKPGKAPKLLIYTASNLQNGVPSRFSGSGSGTDFTLTISSLQPEDFATYYCQQSYRTPLTFGGGTKLEIKR

SEQ ID NO: 1307 - DNA, 18 bp, synthetic construct
  misc_feature 1..18: note = Description of Artificial Sequence: Synthetic oligonucleotide
  source 1..18: mol_type = other DNA
cagaggattagcagcttt

SEQ ID NO: 1308 - protein, 6 aa, synthetic construct
  REGION 1..6: note = Description of Artificial Sequence: Synthetic peptide
QRISSF

SEQ ID NO: 1309-1310 - skipped (2 entries)

SEQ ID NO: 1311 - DNA, 27 bp, synthetic construct
  misc_feature 1..27: note = Description of Artificial Sequence: Synthetic oligonucleotide
  source 1..27: mol_type = other DNA
caacagagttacaggaccccgctcact

SEQ ID NO: 1312 - protein, 9 aa, synthetic construct
  REGION 1..9: note = Description of Artificial Sequence: Synthetic peptide
QQSYRTPLT

SEQ ID NO: 1313 - DNA, 372 bp, synthetic construct
  misc_feature 1..372: note = Description of Artificial Sequence: Synthetic polynucleotide
  source 1..372: mol_type = other DNA
caggtgcagctggtggagtctgggggaggcgtggtccagcctgggaggtccctgagactctcctgtgcagcctctggattcaccttcagtagctatggcatgcactgggtccgccaggctccaggcaaggggctggagtgggtgtcaactatatcatttgatggaagtaacaaatactatgcagactccgtgaagggccgattcaccatctccagagacaattccaagaacacgctgtatctgcaaatgaacagcctgagacctgaggacacggctgtgtattactgtgcgaaaggggggggtaccagtgggtcctacttttactacggtatggacgtctggggccaagggaccacggtcaccgtctcctca

SEQ ID NO: 1314 - protein, 124 aa, synthetic construct
  REGION 1..124: note = Description of Artificial Sequence: Synthetic polypeptide
QVQLVESGGGVVQPGRSLRLSCAASGFTFSSYGMHWVRQAPGKGLEWVSTISFDGSNKYYADSVKGRFTISRDNSKNTLYLQMNSLRPEDTAVYYCAKGGGTSGSYFYYGMDVWGQGTTVTVSS

SEQ ID NO: 1315 - DNA, 24 bp, synthetic construct
  misc_feature 1..24: note = Description of Artificial Sequence: Synthetic oligonucleotide
  source 1..24: mol_type = other DNA
ggattcaccttcagtagctatggc

SEQ ID NO: 1316 - protein, 8 aa, synthetic construct
  REGION 1..8: note = Description of Artificial Sequence: Synthetic peptide
GFTFSSYG

SEQ ID NO: 1317 - DNA, 24 bp, synthetic construct
  misc_feature 1..24: note = Description of Artificial Sequence: Synthetic oligonucleotide
  source 1..24: mol_type = other DNA
atatcatttgatggaagtaacaaa

SEQ ID NO: 1318 - protein, 8 aa, synthetic construct
  REGION 1..8: note = Description of Artificial Sequence: Synthetic peptide
ISFDGSNK

SEQ ID NO: 1319 - DNA, 51 bp, synthetic construct
  misc_feature 1..51: note = Description of Artificial Sequence: Synthetic oligonucleotide
  source 1..51: mol_type = other DNA
gcgaaaggggggggtaccagtgggtcctacttttactacggtatggacgtc

SEQ ID NO: 1320 - protein, 17 aa, synthetic construct
  REGION 1..17: note = Description of Artificial Sequence: Synthetic peptide
AKGGGTSGSYFYYGMDV

SEQ ID NO: 1321 - DNA, 324 bp, synthetic construct
  misc_feature 1..324: note = Description of Artificial Sequence: Synthetic polynucleotide
  source 1..324: mol_type = other DNA
gccatccagatgacccagtctccatcctccctgtctgcatctgtaggagacagagtcaccatcacttgccgggcaagtcagaggattagcagctttttaaattggtatcagcagaaaccagggaaagcccctaagctcctaatctatactgcatccaatttacaaaatggggtcccatcaaggttcagtggcagtggatctgggacagatttcactctcaccatcagcagtctgcaacctgaagattttgcaacttactactgtcaacagagttacaggaccccgctcactttcggcggagggaccaagctggagatcaaacga

SEQ ID NO: 1322 - protein, 108 aa, synthetic construct
  REGION 1..108: note = Description of Artificial Sequence: Synthetic polypeptide
AIQMTQSPSSLSASVGDRVTITCRASQRISSFLNWYQQKPGKAPKLLIYTASNLQNGVPSRFSGSGSGTDFTLTISSLQPEDFATYYCQQSYRTPLTFGGGTKLEIKR

SEQ ID NO: 1323 - DNA, 18 bp, synthetic construct
  misc_feature 1..18: note = Description of Artificial Sequence: Synthetic oligonucleotide
  source 1..18: mol_type = other DNA
cagaggattagcagcttt

SEQ ID NO: 1324 - protein, 6 aa, synthetic construct
  REGION 1..6: note = Description of Artificial Sequence: Synthetic peptide
QRISSF

SEQ ID NO: 1325-1326 - skipped (2 entries)

SEQ ID NO: 1327 - DNA, 27 bp, synthetic construct
  misc_feature 1..27: note = Description of Artificial Sequence: Synthetic oligonucleotide
  source 1..27: mol_type = other DNA
caacagagttacaggaccccgctcact

SEQ ID NO: 1328 - protein, 9 aa, synthetic construct
  REGION 1..9: note = Description of Artificial Sequence: Synthetic peptide
QQSYRTPLT

SEQ ID NO: 1329 - DNA, 354 bp, synthetic construct
  misc_feature 1..354: note = Description of Artificial Sequence: Synthetic polynucleotide
  source 1..354: mol_type = other DNA
caggttcagctggtgcagtctgggactgaggtgaagaagcctggggcctcaatgaaggtctcctgcaaggcttctggatacaccttcaccggctactatattcactgggtgcgacaggcccctggacaagggcttgagtggatgggatggatcaaccctaacagtgatgtcacaaagtatgcacagaagtttcagggcagggtcaccttgaccagggacacgtccatcagtgcagcctatattgacctgagcaggctgagatctgacgacacggccatttattactgtgcgagaatgggggacggtgcagtgtttgactactggggccagggaaccctggtcaccgtctcctca

SEQ ID NO: 1330 - protein, 118 aa, synthetic construct
  REGION 1..118: note = Description of Artificial Sequence: Synthetic polypeptide
QVQLVQSGTEVKKPGASMKVSCKASGYTFTGYYIHWVRQAPGQGLEWMGWINPNSDVTKYAQKFQGRVTLTRDTSISAAYIDLSRLRSDDTAIYYCARMGDGAVFDYWGQGTLVTVSS

SEQ ID NO: 1331 - DNA, 24 bp, synthetic construct
  misc_feature 1..24: note = Description of Artificial Sequence: Synthetic oligonucleotide
  source 1..24: mol_type = other DNA
ggatacaccttcaccggctactat

SEQ ID NO: 1332 - protein, 8 aa, synthetic construct
  REGION 1..8: note = Description of Artificial Sequence: Synthetic peptide
GYTFTGYY

SEQ ID NO: 1333 - DNA, 24 bp, synthetic construct
  misc_feature 1..24: note = Description of Artificial Sequence: Synthetic oligonucleotide
  source 1..24: mol_type = other DNA
atcaaccctaacagtgatgtcaca

SEQ ID NO: 1334 - protein, 8 aa, synthetic construct
  REGION 1..8: note = Description of Artificial Sequence: Synthetic peptide
INPNSDVT

SEQ ID NO: 1335 - DNA, 33 bp, synthetic construct
  misc_feature 1..33: note = Description of Artificial Sequence: Synthetic oligonucleotide
  source 1..33: mol_type = other DNA
gcgagaatgggggacggtgcagtgtttgactac

SEQ ID NO: 1336 - protein, 11 aa, synthetic construct
  REGION 1..11: note = Description of Artificial Sequence: Synthetic peptide
ARMGDGAVFDY

SEQ ID NO: 1337 - DNA, 324 bp, synthetic construct
  misc_feature 1..324: note = Description of Artificial Sequence: Synthetic polynucleotide
  source 1..324: mol_type = other DNA
gacatccagttgacccagtctccatcctccctgtctgcatctgtaggagacagagtcaccatcacttgccgggcaagtcaacgcattagcagctatttaaattggtatcaacagaaaccagggaaagcccctaaggtgctgatctctgttgcatccagtttacaaagtggggtcccatcaaggttcagtggcagtggatttgggacagatttcactctcaccatcagcagtctgcaacctgaggattctgcatcttactactgtcaacagagttacaataccccgctcactttcggcggcgggaccaagctggagatcaaacga

SEQ ID NO: 1338 - protein, 108 aa, synthetic construct
  REGION 1..108: note = Description of Artificial Sequence: Synthetic polypeptide
DIQLTQSPSSLSASVGDRVTITCRASQRISSYLNWYQQKPGKAPKVLISVASSLQSGVPSRFSGSGFGTDFTLTISSLQPEDSASYYCQQSYNTPLTFGGGTKLEIKR

SEQ ID NO: 1339 - DNA, 18 bp, synthetic construct
  misc_feature 1..18: note = Description of Artificial Sequence: Synthetic oligonucleotide
  source 1..18: mol_type = other DNA
caacgcattagcagctat

SEQ ID NO: 1340 - protein, 6 aa, synthetic construct
  REGION 1..6: note = Description of Artificial Sequence: Synthetic peptide
QRISSY

SEQ ID NO: 1341-1342 - skipped (2 entries)

SEQ ID NO: 1343 - DNA, 27 bp, synthetic construct
  misc_feature 1..27: note = Description of Artificial Sequence: Synthetic oligonucleotide
  source 1..27: mol_type = other DNA
caacagagttacaataccccgctcact

SEQ ID NO: 1344 - protein, 9 aa, synthetic construct
  REGION 1..9: note = Description of Artificial Sequence: Synthetic peptide
QQSYNTPLT

SEQ ID NO: 1345 - DNA, 354 bp, synthetic construct
  misc_feature 1..354: note = Description of Artificial Sequence: Synthetic polynucleotide
  source 1..354: mol_type = other DNA
gaggtgcagctggtggagtctggggctgaagtgaagaagcctggggcctcagtgaaggtctcctgcaagacttctggatacagtttcattggctattatatacactggatgcgacaggcccctggacaagggcttgaatggatgggatggatcaaccctaagagtggtgtcacaaattatgcacagaggtttcagggcagggtcaccatgaccagggacacgtccatcagtactgcctacatggaactgagcaggctgaaatctgacgacacggccgtgtatttctgtgcgagaatgggggacggtgcagtgtttgacttctggggccagggaaccctggtcaccgtctcctca

SEQ ID NO: 1346 - protein, 118 aa, synthetic construct
  REGION 1..118: note = Description of Artificial Sequence: Synthetic polypeptide
EVQLVESGAEVKKPGASVKVSCKTSGYSFIGYYIHWMRQAPGQGLEWMGWINPKSGVTNYAQRFQGRVTMTRDTSISTAYMELSRLKSDDTAVYFCARMGDGAVFDFWGQGTLVTVSS

SEQ ID NO: 1347 - DNA, 24 bp, synthetic construct
  misc_feature 1..24: note = Description of Artificial Sequence: Synthetic oligonucleotide
  source 1..24: mol_type = other DNA
ggatacagtttcattggctattat

SEQ ID NO: 1348 - protein, 8 aa, synthetic construct
  REGION 1..8: note = Description of Artificial Sequence: Synthetic peptide
GYSFIGYY

SEQ ID NO: 1349 - DNA, 24 bp, synthetic construct
  misc_feature 1..24: note = Description of Artificial Sequence: Synthetic oligonucleotide
  source 1..24: mol_type = other DNA
atcaaccctaagagtggtgtcaca

SEQ ID NO: 1350 - protein, 8 aa, synthetic construct
  REGION 1..8: note = Description of Artificial Sequence: Synthetic peptide
INPKSGVT

SEQ ID NO: 1351 - DNA, 33 bp, synthetic construct; identical to SEQ ID NO: 1255
  misc_feature 1..33: note = Description of Artificial Sequence: Synthetic oligonucleotide
  source 1..33: mol_type = other DNA

SEQ ID NO: 1352 - protein, 11 aa, synthetic construct
  REGION 1..11: note = Description of Artificial Sequence: Synthetic peptide
ARMGDGAVFDF

SEQ ID NO: 1353 - DNA, 324 bp, synthetic construct
  misc_feature 1..324: note = Description of Artificial Sequence: Synthetic polynucleotide
  source 1..324: mol_type = other DNA
gacatccagttgacccagtctccatcctccctgtctgcatctgtaggagacagagtcaccatcacttgccgggcaagtcagaggattagcagctttttaaattggtatcagcagaaaccagggaaagtccctaagctcctgatctatactgcatccaatttacaaaatggggtcccatcaaggttcagtggcactggatctgggacagatttcactctcaccatcagcagtctgcaacctgaagattttgcaacttactactgtcaacagagttacaggaccccgctcactttcggcggagggaccaaagtggatatcaaacga

SEQ ID NO: 1354 - protein, 108 aa, synthetic construct
  REGION 1..108: note = Description of Artificial Sequence: Synthetic polypeptide
DIQLTQSPSSLSASVGDRVTITCRASQRISSFLNWYQQKPGKVPKLLIYTASNLQNGVPSRFSGTGSGTDFTLTISSLQPEDFATYYCQQSYRTPLTFGGGTKVDIKR

SEQ ID NO: 1355 - DNA, 18 bp, synthetic construct
  misc_feature 1..18: note = Description of Artificial Sequence: Synthetic oligonucleotide
  source 1..18: mol_type = other DNA
cagaggattagcagcttt

SEQ ID NO: 1356 - protein, 6 aa, synthetic construct
  REGION 1..6: note = Description of Artificial Sequence: Synthetic peptide
QRISSF

SEQ ID NO: 1357-1358 - skipped (2 entries)

SEQ ID NO: 1359 - DNA, 27 bp, synthetic construct
  misc_feature 1..27: note = Description of Artificial Sequence: Synthetic oligonucleotide
  source 1..27: mol_type = other DNA
caacagagttacaggaccccgctcact

SEQ ID NO: 1360 - protein, 9 aa, synthetic construct
  REGION 1..9: note = Description of Artificial Sequence: Synthetic peptide
QQSYRTPLT

SEQ ID NO: 1361 - DNA, 354 bp, synthetic construct
  misc_feature 1..354: note = Description of Artificial Sequence: Synthetic polynucleotide
  source 1..354: mol_type = other DNA
gaggtgcagctggtggagtctggggctgaagtgaagaagcctggggcctcagtgaaggtctcctgcaagacttctggatacaccttcaccggctactatatgcactggatacgacaggcccctggacaagggcttgagtggatgggatggatcaaccctaaaagtggtggcacaaattatgcacagaagtttcagggcagggtcaccatgaccagggacacgtccatcagcacagcctacatggaactgagcaggctgagatccgacgacatggccgtgtattattgtgcgagaatgggggacggtgcagtgtttgacttctggggccagggaaccctggtcaccgtctcctca

SEQ ID NO: 1362 - protein, 118 aa, synthetic construct
  REGION 1..118: note = Description of Artificial Sequence: Synthetic polypeptide
EVQLVESGAEVKKPGASVKVSCKTSGYTFTGYYMHWIRQAPGQGLEWMGWINPKSGGTNYAQKFQGRVTMTRDTSISTAYMELSRLRSDDMAVYYCARMGDGAVFDFWGQGTLVTVSS

SEQ ID NO: 1363 - DNA, 24 bp, synthetic construct
  misc_feature 1..24: note = Description of Artificial Sequence: Synthetic oligonucleotide
  source 1..24: mol_type = other DNA
ggatacaccttcaccggctactat

SEQ ID NO: 1364 - protein, 8 aa, synthetic construct
  REGION 1..8: note = Description of Artificial Sequence: Synthetic peptide
GYTFTGYY

SEQ ID NO: 1365 - DNA, 24 bp, synthetic construct
  misc_feature 1..24: note = Description of Artificial Sequence: Synthetic oligonucleotide
  source 1..24: mol_type = other DNA
atcaaccctaaaagtggtggcaca

SEQ ID NO: 1366 - protein, 8 aa, synthetic construct
  REGION 1..8: note = Description of Artificial Sequence: Synthetic peptide
INPKSGGT

SEQ ID NO: 1367 - DNA, 33 bp, synthetic construct; identical to SEQ ID NO: 1255
  misc_feature 1..33: note = Description of Artificial Sequence: Synthetic oligonucleotide
  source 1..33: mol_type = other DNA

SEQ ID NO: 1368 - protein, 11 aa, synthetic construct
  REGION 1..11: note = Description of Artificial Sequence: Synthetic peptide
ARMGDGAVFDF

SEQ ID NO: 1369 - DNA, 327 bp, synthetic construct
  misc_feature 1..327: note = Description of Artificial Sequence: Synthetic polynucleotide
  source 1..327: mol_type = other DNA
gacatcgtgatgacccagtctccatcctccctgtctgcatctgtaggagacagagtcaccatcacttgccgggcaagtcagagcattagcagctatttaaattggtatcagcagaaaccagggaaagcccctaagctcctgatctatgctgcatccagtttgcaaagtggggtcccatcaaggttcagtggcagtggatctgggacagatttcactctcaccatcagcagtctgcaacctgaagattttgcaacttactactgtcaacagagttacagtacccctccgctcactttcggcggagggaccaaagtggatatcaaacga

SEQ ID NO: 1370 - protein, 109 aa, synthetic construct
  REGION 1..109: note = Description of Artificial Sequence: Synthetic polypeptide
DIVMTQSPSSLSASVGDRVTITCRASQSISSYLNWYQQKPGKAPKLLIYAASSLQSGVPSRFSGSGSGTDFTLTISSLQPEDFATYYCQQSYSTPPLTFGGGTKVDIKR

SEQ ID NO: 1371 - DNA, 18 bp, synthetic construct
  misc_feature 1..18: note = Description of Artificial Sequence: Synthetic oligonucleotide
  source 1..18: mol_type = other DNA
cagagcattagcagctat

SEQ ID NO: 1372 - protein, 6 aa, synthetic construct
  REGION 1..6: note = Description of Artificial Sequence: Synthetic peptide
QSISSY

SEQ ID NO: 1373-1374 - skipped (2 entries)

SEQ ID NO: 1375 - DNA, 30 bp, synthetic construct
  misc_feature 1..30: note = Description of Artificial Sequence: Synthetic oligonucleotide
  source 1..30: mol_type = other DNA
caacagagttacagtacccctccgctcact

SEQ ID NO: 1376 - protein, 10 aa, synthetic construct
  REGION 1..10: note = Description of Artificial Sequence: Synthetic peptide
QQSYSTPPLT

SEQ ID NO: 1377 - DNA, 354 bp, synthetic construct
  misc_feature 1..354: note = Description of Artificial Sequence: Synthetic polynucleotide
  source 1..354: mol_type = other DNA
caggttcagctggtgcagtctgggactgaggtgaagaagcctggggcctcagtgaaggtctcctgcaaggcttctggatacaccttcaccggctactatatgcactgggtgcgacaggcccctggacaagggcttgagtggatgggatggatcaaccctaacagtgatgtcacaaactatgcacagaagtttcagggcagggtcaccttgaccagggacacgtccatcagtacagcctacattgacctgagcaggctgagatctgacgacacggccatttattactgtgcgagaatgggggacggtgcagtgtttgactactggggccagggaaccctggtcaccgtctcctca

SEQ ID NO: 1378 - protein, 118 aa, synthetic construct
  REGION 1..118: note = Description of Artificial Sequence: Synthetic polypeptide
QVQLVQSGTEVKKPGASVKVSCKASGYTFTGYYMHWVRQAPGQGLEWMGWINPNSDVTNYAQKFQGRVTLTRDTSISTAYIDLSRLRSDDTAIYYCARMGDGAVFDYWGQGTLVTVSS

SEQ ID NO: 1379 - DNA, 24 bp, synthetic construct
  misc_feature 1..24: note = Description of Artificial Sequence: Synthetic oligonucleotide
  source 1..24: mol_type = other DNA
ggatacaccttcaccggctactat

SEQ ID NO: 1380 - protein, 8 aa, synthetic construct
  REGION 1..8: note = Description of Artificial Sequence: Synthetic peptide
GYTFTGYY

SEQ ID NO: 1381 - DNA, 24 bp, synthetic construct
  misc_feature 1..24: note = Description of Artificial Sequence: Synthetic oligonucleotide
  source 1..24: mol_type = other DNA
atcaaccctaacagtgatgtcaca

SEQ ID NO: 1382 - protein, 8 aa, synthetic construct
  REGION 1..8: note = Description of Artificial Sequence: Synthetic peptide
INPNSDVT

SEQ ID NO: 1383 - DNA, 33 bp, synthetic construct; identical to SEQ ID NO: 1335
  misc_feature 1..33: note = Description of Artificial Sequence: Synthetic oligonucleotide
  source 1..33: mol_type = other DNA

SEQ ID NO: 1384 - protein, 11 aa, synthetic construct
  REGION 1..11: note = Description of Artificial Sequence: Synthetic peptide
ARMGDGAVFDY

SEQ ID NO: 1385 - DNA, 324 bp, synthetic construct
  misc_feature 1..324: note = Description of Artificial Sequence: Synthetic polynucleotide
  source 1..324: mol_type = other DNA
gacatccagatgacccagtctccatcctccctgtctgcatctgtaggagacagagtcaccatcacttgccgggcaagtcagcgcattagcagctatttaaattggtatcagcagaaaccagggaaagcccctaaggtgctgatctctgttgcatccagtttgcaaagtggggtcccatcaaggttcagtggcagtggatctgggacagatttcactctcaccattagtagtctgcaacctgaggattttgcatcttactactgtcaacagagttacaataccccgctcactttcggcggagggaccaaggtggagatcaaacga

SEQ ID NO: 1386 - protein, 108 aa, synthetic construct
  REGION 1..108: note = Description of Artificial Sequence: Synthetic polypeptide
DIQMTQSPSSLSASVGDRVTITCRASQRISSYLNWYQQKPGKAPKVLISVASSLQSGVPSRFSGSGSGTDFTLTISSLQPEDFASYYCQQSYNTPLTFGGGTKVEIKR

SEQ ID NO: 1387 - DNA, 18 bp, synthetic construct
  misc_feature 1..18: note = Description of Artificial Sequence: Synthetic oligonucleotide
  source 1..18: mol_type = other DNA
cagcgcattagcagctat

SEQ ID NO: 1388 - protein, 6 aa, synthetic construct
  REGION 1..6: note = Description of Artificial Sequence: Synthetic peptide
QRISSY

SEQ ID NO: 1389-1390 - skipped (2 entries)

SEQ ID NO: 1391 - DNA, 27 bp, synthetic construct
  misc_feature 1..27: note = Description of Artificial Sequence: Synthetic oligonucleotide
  source 1..27: mol_type = other DNA
caacagagttacaataccccgctcact

SEQ ID NO: 1392 - protein, 9 aa, synthetic construct
  REGION 1..9: note = Description of Artificial Sequence: Synthetic peptide
QQSYNTPLT

SEQ ID NO: 1393 - DNA, 381 bp, synthetic construct
  misc_feature 1..381: note = Description of Artificial Sequence: Synthetic polynucleotide
  source 1..381: mol_type = other DNA
caggtgcagctggtgcagtctgggggaggcttggtcaagcctggggggtccctgagactctcctgtgcagcctctggattcaccttcagtagctatgacatgagctgggtccgccaggctccagggaaggggctggagtgggtttcatacattagtagtagtggtaataccatacattacgcagactctgtgaagggccgattcaccatctccagagacaattccaagaactcactttatctgcaaatgaacagcctgagagccgaggacacggccgtgtattactgtgcgaaagccggtcccgctacggtgacacggaggtactactactactacggtttggacgtctggggccaagggaccacggtcaccgtctcctca

SEQ ID NO: 1394 - protein, 127 aa, synthetic construct
  REGION 1..127: note = Description of Artificial Sequence: Synthetic polypeptide
QVQLVQSGGGLVKPGGSLRLSCAASGFTFSSYDMSWVRQAPGKGLEWVSYISSSGNTIHYADSVKGRFTISRDNSKNSLYLQMNSLRAEDTAVYYCAKAGPATVTRRYYYYYGLDVWGQGTTVTVSS

SEQ ID NO: 1395 - DNA, 24 bp, synthetic construct
  misc_feature 1..24: note = Description of Artificial Sequence: Synthetic oligonucleotide
  source 1..24: mol_type = other DNA
ggattcaccttcagtagctatgac

SEQ ID NO: 1396 - protein, 8 aa, synthetic construct
  REGION 1..8: note = Description of Artificial Sequence: Synthetic peptide
GFTFSSYD

SEQ ID NO: 1397 - DNA, 24 bp, synthetic construct
  misc_feature 1..24: note = Description of Artificial Sequence: Synthetic oligonucleotide
  source 1..24: mol_type = other DNA
attagtagtagtggtaataccata

SEQ ID NO: 1398 - protein, 8 aa, synthetic construct
  REGION 1..8: note = Description of Artificial Sequence: Synthetic peptide
ISSSGNTI

SEQ ID NO: 1399 - DNA, 60 bp, synthetic construct
  misc_feature 1..60: note = Description of Artificial Sequence: Synthetic oligonucleotide
  source 1..60: mol_type = other DNA
gcgaaagccggtcccgctacggtgacacggaggtactactactactacggtttggacgtc

SEQ ID NO: 1400 - protein, 20 aa, synthetic construct
  REGION 1..20: note = Description of Artificial Sequence: Synthetic peptide
AKAGPATVTRRYYYYYGLDV

SEQ ID NO: 1401 - DNA, 324 bp, synthetic construct
  misc_feature 1..324: note = Description of Artificial Sequence: Synthetic polynucleotide
  source 1..324: mol_type = other DNA
gacatcgtgatgacccagtctccatcctccctgtctgcatctgtacgagacagagtcaccatcacttgccgggcaagtcagagaattagcagctatttaaattggtttcagcagaaaccagggaaagcccctaaggtcctgatctatactgcatccagtttgcaaaatggggtcccatcaaggttcagtggcagtggatctgggacagatttcactctcaccatcagcagtctgcaacctgaagactttgcaacttactactgtcagcagagttacaggaccccgctcactttcggcggagggaccaaggtggagatcaaacga

SEQ ID NO: 1402 - protein, 108 aa, synthetic construct
  REGION 1..108: note = Description of Artificial Sequence: Synthetic polypeptide
DIVMTQSPSSLSASVRDRVTITCRASQRISSYLNWFQQKPGKAPKVLIYTASSLQNGVPSRFSGSGSGTDFTLTISSLQPEDFATYYCQQSYRTPLTFGGGTKVEIKR

SEQ ID NO: 1403 - DNA, 18 bp, synthetic construct
  misc_feature 1..18: note = Description of Artificial Sequence: Synthetic oligonucleotide
  source 1..18: mol_type = other DNA
cagagaattagcagctat

SEQ ID NO: 1404 - protein, 6 aa, synthetic construct
  REGION 1..6: note = Description of Artificial Sequence: Synthetic peptide
QRISSY

SEQ ID NO: 1405-1406 - skipped (2 entries)

SEQ ID NO: 1407 - DNA, 27 bp, synthetic construct
  misc_feature 1..27: note = Description of Artificial Sequence: Synthetic oligonucleotide
  source 1..27: mol_type = other DNA
cagcagagttacaggaccccgctcact

SEQ ID NO: 1408 - protein, 9 aa, synthetic construct
  REGION 1..9: note = Description of Artificial Sequence: Synthetic peptide
QQSYRTPLT

SEQ ID NO: 1409 - DNA, 354 bp, synthetic construct
  misc_feature 1..354: note = Description of Artificial Sequence: Synthetic polynucleotide
  source 1..354: mol_type = other DNA
caggtgcagctggtacagtctggggctgaggtgaagaagcctggggcctcagtgaaggtctcctgcaaggcttctggatacacattcatcggctactatatgcactgggtgcgacaggcccctggacaagggcttgagtggatgggatggatcaaccctaaaagtggtggcacaaactatgcacagaagtttcagggcagggtcaccatgaccggggacacgtccatcagcacagcctacatggagctgagcaggctgagatctgacgacacggccgtgttttactgtgcgagaatgggggacggtgcaatgtttgactactggggccagggaaccctggtcaccgtctcctca

SEQ ID NO: 1410 - protein, 118 aa, synthetic construct
  REGION 1..118: note = Description of Artificial Sequence: Synthetic polypeptide
QVQLVQSGAEVKKPGASVKVSCKASGYTFIGYYMHWVRQAPGQGLEWMGWINPKSGGTNYAQKFQGRVTMTGDTSISTAYMELSRLRSDDTAVFYCARMGDGAMFDYWGQGTLVTVSS

SEQ ID NO: 1411 - DNA, 24 bp, synthetic construct
  misc_feature 1..24: note = Description of Artificial Sequence: Synthetic oligonucleotide
  source 1..24: mol_type = other DNA
ggatacacattcatcggctactat

SEQ ID NO: 1412 - protein, 8 aa, synthetic construct
  REGION 1..8: note = Description of Artificial Sequence: Synthetic peptide
GYTFIGYY

SEQ ID NO: 1413 - DNA, 24 bp, synthetic construct
  misc_feature 1..24: note = Description of Artificial Sequence: Synthetic oligonucleotide
  source 1..24: mol_type = other DNA
atcaaccctaaaagtggtggcaca

SEQ ID NO: 1414 - protein, 8 aa, synthetic construct
  REGION 1..8: note = Description of Artificial Sequence: Synthetic peptide
INPKSGGT

SEQ ID NO: 1415 - DNA, 33 bp, synthetic construct
  misc_feature 1..33: note = Description of Artificial Sequence: Synthetic oligonucleotide
  source 1..33: mol_type = other DNA
gcgagaatgggggacggtgcaatgtttgactac

SEQ ID NO: 1416 - protein, 11 aa, synthetic construct
  REGION 1..11: note = Description of Artificial Sequence: Synthetic peptide
ARMGDGAMFDY

SEQ ID NO: 1417 - DNA, 321 bp, synthetic construct
  misc_feature 1..321: note = Description of Artificial Sequence: Synthetic polynucleotide
  source 1..321: mol_type = other DNA
gacatccagatgacccagtctccatcctccctgtctgcatctgtaggagacagagtcaccatcacttgccgggcaagtcagagaattagcagctatttaaattggtatcagcagaaagcagggaaagcccctaaggtcctgatctatactgcatccagtttgcaaagtggggtcccatcacgattcagtggcagtggatctgggacagatttcactctcaccatcagcagtctgcaacctgaagattttgcaacttactactgtcaacagagttacagtaccccgctcactttcggcggagggaccaaggtggagatcaaa

SEQ ID NO: 1418 - protein, 107 aa, synthetic construct
  REGION 1..107: note = Description of Artificial Sequence: Synthetic polypeptide
DIQMTQSPSSLSASVGDRVTITCRASQRISSYLNWYQQKAGKAPKVLIYTASSLQSGVPSRFSGSGSGTDFTLTISSLQPEDFATYYCQQSYSTPLTFGGGTKVEIK

SEQ ID NO: 1419 - DNA, 18 bp, synthetic construct
  misc_feature 1..18: note = Description of Artificial Sequence: Synthetic oligonucleotide
  source 1..18: mol_type = other DNA
cagagaattagcagctat

SEQ ID NO: 1420 - protein, 6 aa, synthetic construct
  REGION 1..6: note = Description of Artificial Sequence: Synthetic peptide
QRISSY

SEQ ID NO: 1421-1422 - skipped (2 entries)

SEQ ID NO: 1423 - DNA, 27 bp, synthetic construct
  misc_feature 1..27: note = Description of Artificial Sequence: Synthetic oligonucleotide
  source 1..27: mol_type = other DNA
caacagagttacagtaccccgctcact

SEQ ID NO: 1424 - protein, 9 aa, synthetic construct
  REGION 1..9: note = Description of Artificial Sequence: Synthetic peptide
QQSYSTPLT

SEQ ID NO: 1425 - DNA, 375 bp, synthetic construct
  misc_feature 1..375: note = Description of Artificial Sequence: Synthetic polynucleotide
  source 1..375: mol_type = other DNA
caggtgcagctggtacagtctgggggaggcgtggtacagcctggggggtccctgagactctcctgtgcagcctctggattcacctttgatgattatgccatgcactgggtccgtcaagctccagggaagggtctggagtgggtctctcttattagtggggatggtggtagcacatactatgcagactctgtgaagggccgattcaccatctccagagacaacagcaaaaactccctgtatctgcaaatgaacagtctgagaactgaggacaccgccttgtattactgtgcaaaagatgatagcagctcgtcctggtactactactactacggtatggacgtctggggccgagggaccacggtcaccgtctcctca

SEQ ID NO: 1426 - protein, 125 aa, synthetic construct
  REGION 1..125: note = Description of Artificial Sequence: Synthetic polypeptide
QVQLVQSGGGVVQPGGSLRLSCAASGFTFDDYAMHWVRQAPGKGLEWVSLISGDGGSTYYADSVKGRFTISRDNSKNSLYLQMNSLRTEDTALYYCAKDDSSSSWYYYYYGMDVWGRGTTVTVSS

SEQ ID NO: 1427 - DNA, 24 bp, synthetic construct
  misc_feature 1..24: note = Description of Artificial Sequence: Synthetic oligonucleotide
  source 1..24: mol_type = other DNA
ggattcacctttgatgattatgcc

SEQ ID NO: 1428 - protein, 8 aa, synthetic construct
  REGION 1..8: note = Description of Artificial Sequence: Synthetic peptide
GFTFDDYA

SEQ ID NO: 1429 - DNA, 24 bp, synthetic construct
  misc_feature 1..24: note = Description of Artificial Sequence: Synthetic oligonucleotide
  source 1..24: mol_type = other DNA
attagtggggatggtggtagcaca

SEQ ID NO: 1430 - protein, 8 aa, synthetic construct
  REGION 1..8: note = Description of Artificial Sequence: Synthetic peptide
ISGDGGST

SEQ ID NO: 1431 - DNA, 54 bp, synthetic construct
  misc_feature 1..54: note = Description of Artificial Sequence: Synthetic oligonucleotide
  source 1..54: mol_type = other DNA
gcaaaagatgatagcagctcgtcctggtactactactactacggtatggacgtc

SEQ ID NO: 1432 - protein, 18 aa, synthetic construct
  REGION 1..18: note = Description of Artificial Sequence: Synthetic peptide
AKDDSSSSWYYYYYGMDV

SEQ ID NO: 1433 - DNA, 324 bp, synthetic construct
  misc_feature 1..324: note = Description of Artificial Sequence: Synthetic polynucleotide
  source 1..324: mol_type = other DNA
gacatccagatgacccagtctccatcctccctgtctgcatctgtaggagacagagtcaccatcacttgccgggcaagtcagcgcattagcagctatttaaattggtatcagcagaaaccagggaaagcccctaaggtgctgatctctgttgcatccagtttgcaaagtggggtcccatcaaggttcagtggcagtggatctgggacagatttcactctcaccatcagcagtctgcaacctgaggattttgcatcttactactgtcaacagagttacaataccccgctcactttcggcggagggaccaaggtggagatcaaacga

SEQ ID NO: 1434 - protein, 108 aa, synthetic construct; identical to SEQ ID NO: 1386
  REGION 1..108: note = Description of Artificial Sequence: Synthetic polypeptide

SEQ ID NO: 1435 - DNA, 18 bp, synthetic construct
  misc_feature 1..18: note = Description of Artificial Sequence: Synthetic oligonucleotide
  source 1..18: mol_type = other DNA
cagcgcattagcagctat

SEQ ID NO: 1436 - protein, 6 aa, synthetic construct
  REGION 1..6: note = Description of Artificial Sequence: Synthetic peptide
QRISSY

SEQ ID NO: 1437-1438 - skipped (2 entries)

SEQ ID NO: 1439 - DNA, 27 bp, synthetic construct
  misc_feature 1..27: note = Description of Artificial Sequence: Synthetic oligonucleotide
  source 1..27: mol_type = other DNA
caacagagttacaataccccgctcact

SEQ ID NO: 1440 - protein, 9 aa, synthetic construct
  REGION 1..9: note = Description of Artificial Sequence: Synthetic peptide
QQSYNTPLT

SEQ ID NO: 1441 - DNA, 372 bp, synthetic construct
  misc_feature 1..372: note = Description of Artificial Sequence: Synthetic polynucleotide
  source 1..372: mol_type = other DNA
gaggtgcagctggtggagtctgggggaggcttggtacagcctggcaggtccctgagactctcctgtgcagcctctggattcacctttggtgattataccatgcactgggtccggcaagctccagggaagggcctggagtgggtctccgatattagttggaatagtggtagcaaagactatgcggactctgtgaagggccgattcaccatctccagagacaacgccaagaactccctctatcttcaaatgaacagtctgagaactgaggatacggccttttattactgtgcaaaagatagtaggggctacggtctctactaccacctcggtttggacgtctggggccaagggaccacggtcaccgtctcctca

SEQ ID NO: 1442 - protein, 124 aa, synthetic construct
  REGION 1..124: note = Description of Artificial Sequence: Synthetic polypeptide
EVQLVESGGGLVQPGRSLRLSCAASGFTFGDYTMHWVRQAPGKGLEWVSDISWNSGSKDYADSVKGRFTISRDNAKNSLYLQMNSLRTEDTAFYYCAKDSRGYGLYYHLGLDVWGQGTTVTVSS

SEQ ID NO: 1443 - DNA, 24 bp, synthetic construct
  misc_feature 1..24: note = Description of Artificial Sequence: Synthetic oligonucleotide
  source 1..24: mol_type = other DNA
ggattcacctttggtgattatacc

SEQ ID NO: 1444 - protein, 8 aa, synthetic construct
  REGION 1..8: note = Description of Artificial Sequence: Synthetic peptide
GFTFGDYT

SEQ ID NO: 1445 - DNA, 24 bp, synthetic construct
  misc_feature 1..24: note = Description of Artificial Sequence: Synthetic oligonucleotide
  source 1..24: mol_type = other DNA
attagttggaatagtggtagcaaa

SEQ ID NO: 1446 - protein, 8 aa, synthetic construct
  REGION 1..8: note = Description of Artificial Sequence: Synthetic peptide
ISWNSGSK

SEQ ID NO: 1447 - DNA, 51 bp, synthetic construct
  misc_feature 1..51: note = Description of Artificial Sequence: Synthetic oligonucleotide
  source 1..51: mol_type = other DNA
gcaaaagatagtaggggctacggtctctactaccacctcggtttggacgtc

SEQ ID NO: 1448 - protein, 17 aa, synthetic construct
  REGION 1..17: note = Description of Artificial Sequence: Synthetic peptide
AKDSRGYGLYYHLGLDV

SEQ ID NO: 1449 - DNA, 372 bp, synthetic construct
  misc_feature 1..372: note = Description of Artificial Sequence: Synthetic polynucleotide
  source 1..372: mol_type = other DNA
gaggtgcagctggtggagtctgggggaggcttggtgcagcctggcaggtccctgagactctcctgtgcagcctctggattcacctttgctgattataccatgcactgggtccggcaagctccagggaagggcctggagtgggtctcagatattagttggaatagtggtagtatagcctatgcggactctgtgaagggccgattcaccatctccagagacaacgccaagaactccctctatcttcaaatgaacagtctgagaactgaggacacggccttttattactgtgcaaaagatagtaggggctacggtcactataagtacctcggtttggacgtctggggccaagggaccacggtcaccgtctcctca

SEQ ID NO: 1450 - protein, 124 aa, synthetic construct
  REGION 1..124: note = Description of Artificial Sequence: Synthetic polypeptide
EVQLVESGGGLVQPGRSLRLSCAASGFTFADYTMHWVRQAPGKGLEWVSDISWNSGSIAYADSVKGRFTISRDNAKNSLYLQMNSLRTEDTAFYYCAKDSRGYGHYKYLGLDVWGQGTTVTVSS

SEQ ID NO: 1451 - DNA, 24 bp, synthetic construct
  misc_feature 1..24: note = Description of Artificial Sequence: Synthetic oligonucleotide
  source 1..24: mol_type = other DNA
ggattcacctttgctgattatacc

SEQ ID NO: 1452 - protein, 8 aa, synthetic construct
  REGION 1..8: note = Description of Artificial Sequence: Synthetic peptide
GFTFADYT

SEQ ID NO: 1453 - DNA, 24 bp, synthetic construct
  misc_feature 1..24: note = Description of Artificial Sequence: Synthetic oligonucleotide
  source 1..24: mol_type = other DNA
attagttggaatagtggtagtata

SEQ ID NO: 1454 - protein, 8 aa, synthetic construct
  REGION 1..8: note = Description of Artificial Sequence: Synthetic peptide
ISWNSGSI

SEQ ID NO: 1455 - DNA, 51 bp, synthetic construct
  misc_feature 1..51: note = Description of Artificial Sequence: Synthetic oligonucleotide
  source 1..51: mol_type = other DNA
gcaaaagatagtaggggctacggtcactataagtacctcggtttggacgtc

SEQ ID NO: 1456 - protein, 17 aa, synthetic construct
  REGION 1..17: note = Description of Artificial Sequence: Synthetic peptide
AKDSRGYGHYKYLGLDV

SEQ ID NO: 1457 - DNA, 372 bp, synthetic construct
  misc_feature 1..372: note = Description of Artificial Sequence: Synthetic polynucleotide
  source 1..372: mol_type = other DNA
gaggtgcagctggtggagtctgggggaggcatggtacagcctggcaggtccctgagactctcctgtgcagcctctggattccccttcaatgattacaccatgcactgggtccggcaagtcccagggaggggcctggagtgggtctcagatattagttggaatagcggcagtaaaggctatgcggactctgtgaagggtcgattcatcatctccagagacaacgccaagaactccctgtacctgcaaatgaacagtctgagagttgaagacacggccttgtattactgtgtaaaagatggaagtggctacgggaggttccattattacgctatggacgtctggggccaagggaccacggtcaccgtctcctca

SEQ ID NO: 1458 - protein, 124 aa, synthetic construct
  REGION 1..124: note = Description of Artificial Sequence: Synthetic polypeptide
EVQLVESGGGMVQPGRSLRLSCAASGFPFNDYTMHWVRQVPGRGLEWVSDISWNSGSKGYADSVKGRFIISRDNAKNSLYLQMNSLRVEDTALYYCVKDGSGYGRFHYYAMDVWGQGTTVTVSS

SEQ ID NO: 1459 - DNA, 24 bp, synthetic construct
  misc_feature 1..24: note = Description of Artificial Sequence: Synthetic oligonucleotide
  source 1..24: mol_type = other DNA
ggattccccttcaatgattacacc

SEQ ID NO: 1460 - protein, 8 aa, synthetic construct
  REGION 1..8: note = Description of Artificial Sequence: Synthetic peptide
GFPFNDYT

SEQ ID NO: 1461 - DNA, 24 bp, synthetic construct
  misc_feature 1..24: note = Description of Artificial Sequence: Synthetic oligonucleotide
  source 1..24: mol_type = other DNA
attagttggaatagcggcagtaaa

SEQ ID NO: 1462 - protein, 8 aa, synthetic construct
  REGION 1..8: note = Description of Artificial Sequence: Synthetic peptide
ISWNSGSK

SEQ ID NO: 1463 - DNA, 51 bp, synthetic construct
  misc_feature 1..51: note = Description of Artificial Sequence: Synthetic oligonucleotide
  source 1..51: mol_type = other DNA
gtaaaagatggaagtggctacgggaggttccattattacgctatggacgtc

SEQ ID NO: 1464 - protein, 17 aa, synthetic construct
  REGION 1..17: note = Description of Artificial Sequence: Synthetic peptide
VKDGSGYGRFHYYAMDV

SEQ ID NO: 1465 - DNA, 372 bp, synthetic construct
  misc_feature 1..372: note = Description of Artificial Sequence: Synthetic polynucleotide
  source 1..372: mol_type = other DNA
gaggtgcagctggtggagtctggtggaggcttggtacagcctggcaggtccctgagactctcctgtgcagcctctggattcacctttgctgattataccatgcactgggtccgccaagttccagggaagggcctggagtgggtctcagatattagttggaatagtggtagcaaagactatgcggactctgtgaagggccgcttcaccatctccagagacaacgccaagaatttcctgtatctgcaaatgaacagtctgagagctgaagacacggccttgtattactgtgtaaaatatggaagtggctacgggaaattctacttctacgctatggacgtctggggccaagggaccacggtcaccgtctcctca

SEQ ID NO: 1466 - protein, 124 aa, synthetic construct
  REGION 1..124: note = Description of Artificial Sequence: Synthetic polypeptide
EVQLVESGGGLVQPGRSLRLSCAASGFTFADYTMHWVRQVPGKGLEWVSDISWNSGSKDYADSVKGRFTISRDNAKNFLYLQMNSLRAEDTALYYCVKYGSGYGKFYFYAMDVWGQGTTVTVSS

SEQ ID NO: 1467 - DNA, 24 bp, synthetic construct
  misc_feature 1..24: note = Description of Artificial Sequence: Synthetic oligonucleotide
  source 1..24: mol_type = other DNA
ggattcacctttgctgattatacc

SEQ ID NO: 1468 - protein, 8 aa, synthetic construct
  REGION 1..8: note = Description of Artificial Sequence: Synthetic peptide
GFTFADYT

SEQ ID NO: 1469 - DNA, 24 bp, synthetic construct
  misc_feature 1..24: note = Description of Artificial Sequence: Synthetic oligonucleotide
  source 1..24: mol_type = other DNA
attagttggaatagtggtagcaaa

SEQ ID NO: 1470 - protein, 8 aa, synthetic construct
  REGION 1..8: note = Description of Artificial Sequence: Synthetic peptide
ISWNSGSK

SEQ ID NO: 1471 - DNA, 51 bp, synthetic construct
  misc_feature 1..51: note = Description of Artificial Sequence: Synthetic oligonucleotide
  source 1..51: mol_type = other DNA
gtaaaatatggaagtggctacgggaaattctacttctacgctatggacgtc

SEQ ID NO: 1472 - protein, 17 aa, synthetic construct
  REGION 1..17: note = Description of Artificial Sequence: Synthetic peptide
VKYGSGYGKFYFYAMDV

SEQ ID NO: 1473 - DNA, 372 bp, synthetic construct
  misc_feature 1..372: note = Description of Artificial Sequence: Synthetic polynucleotide
  source 1..372: mol_type = other DNA
gaggtgcagctggtgcagtctgggggaggcttggtacagcctggcaggtccctgagactctcctgtgcagcctctggattcacctttgctgattataccatgcactgggtccggcaaactccagggaagggcctggagtgggtctcaggtattagttggaatagtggtagcaaagactatgcggactctgtgaagggccgattcaccatctccagagacaacgccaagaactccctgtatctgcaaatgaacagtctgagaactgaggacacggccttgtattactgtgcaaaatatggaagtggctacgggagatatttcttctacgctatggacgtctggggccaagggaccacggtcaccgtctcctca

SEQ ID NO: 1474 - protein, 124 aa, synthetic construct
  REGION 1..124: note = Description of Artificial Sequence: Synthetic polypeptide
EVQLVQSGGGLVQPGRSLRLSCAASGFTFADYTMHWVRQTPGKGLEWVSGISWNSGSKDYADSVKGRFTISRDNAKNSLYLQMNSLRTEDTALYYCAKYGSGYGRYFFYAMDVWGQGTTVTVSS

SEQ ID NO: 1475 - DNA, 24 bp, synthetic construct
  misc_feature 1..24: note = Description of Artificial Sequence: Synthetic oligonucleotide
  source 1..24: mol_type = other DNA
ggattcacctttgctgattatacc

SEQ ID NO: 1476 - protein, 8 aa, synthetic construct
  REGION 1..8: note = Description of Artificial Sequence: Synthetic peptide
GFTFADYT

SEQ ID NO: 1477 - DNA, 24 bp, synthetic construct
  misc_feature 1..24: note = Description of Artificial Sequence: Synthetic oligonucleotide
  source 1..24: mol_type = other DNA
attagttggaatagtggtagcaaa

SEQ ID NO: 1478 - protein, 8 aa, synthetic construct
  REGION 1..8: note = Description of Artificial Sequence: Synthetic peptide
ISWNSGSK

SEQ ID NO: 1479 - DNA, 51 bp, synthetic construct
  misc_feature 1..51: note = Description of Artificial Sequence: Synthetic oligonucleotide
  source 1..51: mol_type = other DNA
gcaaaatatggaagtggctacgggagatatttcttctacgctatggacgtc

SEQ ID NO: 1480 - protein, 17 aa, synthetic construct
  REGION 1..17: note = Description of Artificial Sequence: Synthetic peptide
AKYGSGYGRYFFYAMDV

SEQ ID NO: 1481 - DNA, 372 bp, synthetic construct
  misc_feature 1..372: note = Description of Artificial Sequence: Synthetic polynucleotide
  source 1..372: mol_type = other DNA
gaggtgcagctggtggagtcaaggggagccttggtacagcctggcaggtccctgagactctcctgtgcagcctctggattcgcctttaatgattataccatgcactgggtccggcaagctccagggaagggcctggagtgggtctcagatattagttggaatagtaatagtaaagactatgcggactctgtgaagggccgattcaccatctccagagacaatgccaagaactccctctatctacaaatgaacagtctgagagctgaggacacggccttgtattactgtgtaaaagatggaagtggctacgggaaattttccctctacgctttggacgtctggggccaagggaccacggtcaccgtctcctca

SEQ ID NO: 1482 - protein, 124 aa, synthetic construct
  REGION 1..124: note = Description of Artificial Sequence: Synthetic polypeptide
EVQLVESRGALVQPGRSLRLSCAASGFAFNDYTMHWVRQAPGKGLEWVSDISWNSNSKDYADSVKGRFTISRDNAKNSLYLQMNSLRAEDTALYYCVKDGSGYGKFSLYALDVWGQGTTVTVSS

SEQ ID NO: 1483 - DNA, 24 bp, synthetic construct
  misc_feature 1..24: note = Description of Artificial Sequence: Synthetic oligonucleotide
  source 1..24: mol_type = other DNA
ggattcgcctttaatgattatacc

SEQ ID NO: 1484 - protein, 8 aa, synthetic construct
  REGION 1..8: note = Description of Artificial Sequence: Synthetic peptide
GFAFNDYT

SEQ ID NO: 1485 - DNA, 24 bp, synthetic construct
  misc_feature 1..24: note = Description of Artificial Sequence: Synthetic oligonucleotide
  source 1..24: mol_type = other DNA
attagttggaatagtaatagtaaa

SEQ ID NO: 1486 - protein, 8 aa, synthetic construct
  REGION 1..8: note = Description of Artificial Sequence: Synthetic peptide
ISWNSNSK

SEQ ID NO: 1487 - DNA, 51 bp, synthetic construct
  misc_feature 1..51: note = Description of Artificial Sequence: Synthetic oligonucleotide
  source 1..51: mol_type = other DNA
gtaaaagatggaagtggctacgggaaattttccctctacgctttggacgtc

SEQ ID NO: 1488 - protein, 17 aa, synthetic construct
  REGION 1..17: note = Description of Artificial Sequence: Synthetic peptide
VKDGSGYGKFSLYALDV

SEQ ID NO: 1489 - DNA, 372 bp, synthetic construct
  misc_feature 1..372: note = Description of Artificial Sequence: Synthetic polynucleotide
  source 1..372: mol_type = other DNA
caggtgcagctggtggagtctgggggaggcttggttcaccctggcaggtccctgagactctcctgtgcagcctctggattcaaatttgatgattataccatgcactgggtccggcaagctccagggaagggcctagagtgggtctcagatattagttggaatagtggtagtaaaggctatgcggactctgtgaagggccgattcaccatctccagagacaacgccaaggattccctatatctgcagatggacagtctgagagctgcagacacggccttctattactgtgcaaaagataaaagtggctacggccacttctactactacgctatggacgtctggggccaagggaccacggtcaccgtctcctca

SEQ ID NO: 1490 - protein, 124 aa, synthetic construct
  REGION 1..124: note = Description of Artificial Sequence: Synthetic polypeptide
QVQLVESGGGLVHPGRSLRLSCAASGFKFDDYTMHWVRQAPGKGLEWVSDISWNSGSKGYADSVKGRFTISRDNAKDSLYLQMDSLRAADTAFYYCAKDKSGYGHFYYYAMDVWGQGTTVTVSS

SEQ ID NO: 1491 - DNA, 24 bp, synthetic construct
  misc_feature 1..24: note = Description of Artificial Sequence: Synthetic oligonucleotide
  source 1..24: mol_type = other DNA
ggattcaaatttgatgattatacc

SEQ ID NO: 1492 - protein, 8 aa, synthetic construct
  REGION 1..8: note = Description of Artificial Sequence: Synthetic peptide
GFKFDDYT

SEQ ID NO: 1493 - DNA, 24 bp, synthetic construct
  misc_feature 1..24: note = Description of Artificial Sequence: Synthetic oligonucleotide
  source 1..24: mol_type = other DNA
attagttggaatagtggtagtaaa

SEQ ID NO: 1494 - protein, 8 aa, synthetic construct
  REGION 1..8: note = Description of Artificial Sequence: Synthetic peptide
ISWNSGSK

SEQ ID NO: 1495 - DNA, 51 bp, synthetic construct
  misc_feature 1..51: note = Description of Artificial Sequence: Synthetic oligonucleotide
  source 1..51: mol_type = other DNA
gcaaaagataaaagtggctacggccacttctactactacgctatggacgtc

SEQ ID NO: 1496 - protein, 17 aa, synthetic construct
  REGION 1..17: note = Description of Artificial Sequence: Synthetic peptide
AKDKSGYGHFYYYAMDV

SEQ ID NO: 1497 - DNA, 372 bp, synthetic construct
  misc_feature 1..372: note = Description of Artificial Sequence: Synthetic polynucleotide
  source 1..372: mol_type = other DNA
gaggtgcagctggtggagtctgggggaggcttggtacaccctggcaggtccctaagactctcctgtacagcctctggattcaagtttgctgattataccatgcactgggtccggcaagctccagggaagggcctggagtgggtctcagatattagttggaatagtggtagtaaaggctatgcggactctgtaaagggccgattcaccatctccagagacaatgacaagaactccctgtatctgcaaatgaacagtctgagaggtgaggacacggccttgtattactgtgcaaaagatggaagtggctacgggaggttccacttctacgctatcgacgtctggggccaagggaccacggtcaccgtctcctca

SEQ ID NO: 1498 - protein, 124 aa, synthetic construct
  REGION 1..124: note = Description of Artificial Sequence: Synthetic polypeptide
EVQLVESGGGLVHPGRSLRLSCTASGFKFADYTMHWVRQAPGKGLEWVSDISWNSGSKGYADSVKGRFTISRDNDKNSLYLQMNSLRGEDTALYYCAKDGSGYGRFHFYAIDVWGQGTTVTVSS

SEQ ID NO: 1499 - DNA, 24 bp, synthetic construct
  misc_feature 1..24: note = Description of Artificial Sequence: Synthetic oligonucleotide
  source 1..24: mol_type = other DNA
ggattcaagtttgctgattatacc

SEQ ID NO: 1500 - protein, 8 aa, synthetic construct
  REGION 1..8: note = Description of Artificial Sequence: Synthetic peptide
GFKFADYT

SEQ ID NO: 1501 - DNA, 24 bp, synthetic construct
  misc_feature 1..24: note = Description of Artificial Sequence: Synthetic oligonucleotide
  source 1..24: mol_type = other DNA
attagttggaatagtggtagtaaa

SEQ ID NO: 1502 - protein, 8 aa, synthetic construct
  REGION 1..8: note = Description of Artificial Sequence: Synthetic peptide
ISWNSGSK

SEQ ID NO: 1503 - DNA, 51 bp, synthetic construct
  misc_feature 1..51: note = Description of Artificial Sequence: Synthetic oligonucleotide
  source 1..51: mol_type = other DNA
gcaaaagatggaagtggctacgggaggttccacttctacgctatcgacgtc

SEQ ID NO: 1504 - protein, 17 aa, synthetic construct
  REGION 1..17: note = Description of Artificial Sequence: Synthetic peptide
AKDGSGYGRFHFYAIDV

SEQ ID NO: 1505 - DNA, 372 bp, synthetic construct
  misc_feature 1..372: note = Description of Artificial Sequence: Synthetic polynucleotide
  source 1..372: mol_type = other DNA
gaggtgcagctggtggagtctgggggaggcttggtacagcctggcaggtccctgagactctcctgtgtagcctctggattcacctttgatgattattccatgcactgggtccggcaagctccagggaagggcctggagtgggtctcaggtattagttggaatagtggtagcaaagactatgcggactctgtgaagggccgattcaccatctccagagacaacgccaagaactccctgtatctgcaaatgaacagtctgagagctgaagacacggccttgtattactgtgcaaaatatggaagtggctacgggaagttctaccactacggtttggacgtctggggccaagggaccacggtcaccgtctcctca

SEQ ID NO: 1506 - protein, 124 aa, synthetic construct
  REGION 1..124: note = Description of Artificial Sequence: Synthetic polypeptide
EVQLVESGGGLVQPGRSLRLSCVASGFTFDDYSMHWVRQAPGKGLEWVSGISWNSGSKDYADSVKGRFTISRDNAKNSLYLQMNSLRAEDTALYYCAKYGSGYGKFYHYGLDVWGQGTTVTVSS

SEQ ID NO: 1507 - DNA, 24 bp, synthetic construct
  misc_feature 1..24: note = Description of Artificial Sequence: Synthetic oligonucleotide
  source 1..24: mol_type = other DNA
ggattcacctttgatgattattcc

SEQ ID NO: 1508 - protein, 8 aa, synthetic construct
  REGION 1..8: note = Description of Artificial Sequence: Synthetic peptide
GFTFDDYS

SEQ ID NO: 1509 - DNA, 24 bp, synthetic construct
  misc_feature 1..24: note = Description of Artificial Sequence: Synthetic oligonucleotide
  source 1..24: mol_type = other DNA
attagttggaatagtggtagcaaa

SEQ ID NO: 1510 - protein, 8 aa, synthetic construct
  REGION 1..8: note = Description of Artificial Sequence: Synthetic peptide
ISWNSGSK

SEQ ID NO: 1511 - DNA, 51 bp, synthetic construct
  misc_feature 1..51: note = Description of Artificial Sequence: Synthetic oligonucleotide
  source 1..51: mol_type = other DNA
gcaaaatatggaagtggctacgggaagttctaccactacggtttggacgtc

SEQ ID NO: 1512 - protein, 17 aa, synthetic construct
  REGION 1..17: note = Description of Artificial Sequence: Synthetic peptide
AKYGSGYGKFYHYGLDV

SEQ ID NO: 1513 - DNA, 372 bp, synthetic construct
  misc_feature 1..372: note = Description of Artificial Sequence: Synthetic polynucleotide
  source 1..372: mol_type = other DNA
caggtgcagttggtggagtctgggggaggcttggtacagcctggcaggtccctgagactctcctgtgcagcctctggattcacctttgctgattataccatgcactgggtccggcaggctccagggaagggcctggagtgggtctcagatattagttggaatagtggtagcatgggctatgcggactctgtgaagggccgattcaccatctccagagacaacgccaagaaatccctgtatctgcaaatgaacagtctgagaactgaggacacggccttgtattactgtgcaaaagatggaagtggctacgggaaatacttcttctacgctatggacgtctggggccaagggaccacggtcaccgtctcctca

SEQ ID NO: 1514 - protein, 124 aa, synthetic construct
  REGION 1..124: note = Description of Artificial Sequence: Synthetic polypeptide
QVQLVESGGGLVQPGRSLRLSCAASGFTFADYTMHWVRQAPGKGLEWVSDISWNSGSMGYADSVKGRFTISRDNAKKSLYLQMNSLRTEDTALYYCAKDGSGYGKYFFYAMDVWGQGTTVTVSS

SEQ ID NO: 1515 - DNA, 24 bp, synthetic construct
  misc_feature 1..24: note = Description of Artificial Sequence: Synthetic oligonucleotide
  source 1..24: mol_type = other DNA
ggattcacctttgctgattatacc

SEQ ID NO: 1516 - protein, 8 aa, synthetic construct
  REGION 1..8: note = Description of Artificial Sequence: Synthetic peptide
GFTFADYT

SEQ ID NO: 1517 - DNA, 24 bp, synthetic construct
  misc_feature 1..24: note = Description of Artificial Sequence: Synthetic oligonucleotide
  source 1..24: mol_type = other DNA
attagttggaatagtggtagcatg

SEQ ID NO: 1518 - protein, 8 aa, synthetic construct
  REGION 1..8: note = Description of Artificial Sequence: Synthetic peptide
ISWNSGSM

SEQ ID NO: 1519 - DNA, 51 bp, synthetic construct
  misc_feature 1..51: note = Description of Artificial Sequence: Synthetic oligonucleotide
  source 1..51: mol_type = other DNA
gcaaaagatggaagtggctacgggaaatacttcttctacgctatggacgtc

SEQ ID NO: 1520 - protein, 17 aa, synthetic construct
  REGION 1..17: note = Description of Artificial Sequence: Synthetic peptide
AKDGSGYGKYFFYAMDV

SEQ ID NO: 1521 - DNA, 372 bp, synthetic construct
  misc_feature 1..372: note = Description of Artificial Sequence: Synthetic polynucleotide
  source 1..372: mol_type = other DNA
gaggtgcagctggtgcagtctgggggaggcttggtacagcctggcaggtccctgagactctcctgtgcagcctctggattcaccttttctgattatactatgcattgggtccggcaaggtccagggaagggcctggagtgggtctcagatattagttggaatagtggtagtaaaggctatacggactctgtgaagggccgattcaccatttccagagacaacgccaagaagtccctgtatctacaaatgaacagtctgagagctgaggacacggccttgtactactgtgtaaaagatggaagtggctacgggaaataccacttctacgctatggacgtctggggccaagggaccctggtcaccgtctcctca

SEQ ID NO: 1522 - protein, 124 aa, synthetic construct
  REGION 1..124: note = Description of Artificial Sequence: Synthetic polypeptide
EVQLVQSGGGLVQPGRSLRLSCAASGFTFSDYTMHWVRQGPGKGLEWVSDISWNSGSKGYTDSVKGRFTISRDNAKKSLYLQMNSLRAEDTALYYCVKDGSGYGKYHFYAMDVWGQGTLVTVSS

SEQ ID NO: 1523 - DNA, 24 bp, synthetic construct
  misc_feature 1..24: note = Description of Artificial Sequence: Synthetic oligonucleotide
  source 1..24: mol_type = other DNA
ggattcaccttttctgattatact

SEQ ID NO: 1524 - protein, 8 aa, synthetic construct
  REGION 1..8: note = Description of Artificial Sequence: Synthetic peptide
GFTFSDYT

SEQ ID NO: 1525 - DNA, 24 bp, synthetic construct
  misc_feature 1..24: note = Description of Artificial Sequence: Synthetic oligonucleotide
  source 1..24: mol_type = other DNA
attagttggaatagtggtagtaaa

SEQ ID NO: 1526 - protein, 8 aa, synthetic construct
  REGION 1..8: note = Description of Artificial Sequence: Synthetic peptide
ISWNSGSK

SEQ ID NO: 1527 - DNA, 51 bp, synthetic construct
  misc_feature 1..51: note = Description of Artificial Sequence: Synthetic oligonucleotide
  source 1..51: mol_type = other DNA
gtaaaagatggaagtggctacgggaaataccacttctacgctatggacgtc

SEQ ID NO: 1528 - protein, 17 aa, synthetic construct
  REGION 1..17: note = Description of Artificial Sequence: Synthetic peptide
VKDGSGYGKYHFYAMDV

SEQ ID NO: 1529 - DNA, 372 bp, synthetic construct
  misc_feature 1..372: note = Description of Artificial Sequence: Synthetic polynucleotide
  source 1..372: mol_type = other DNA
gaggtgcagctggtggagtcggggggaggcttggttcaccctggcaggtccctgagactctcctgtgcagcctctggattcacctttgatgattataccatgcactgggtccggcaagctccagggaagggcctggaatgggtctcagatattagttggaatagtggtagcagaggctatgcggactctgtgaagggccgattcaccatctccagagataatgccgagaactccctgtacctgcaaatgaacagtctgagagctgaggacacggccttgtattactgtgcaaaagataaaagtggctacggccactactactactacgctatggacgtctggggccaagggaccacggtcaccgtctcctca

SEQ ID NO: 1530 - protein, 124 aa, synthetic construct
  REGION 1..124: note = Description of Artificial Sequence: Synthetic polypeptide
EVQLVESGGGLVHPGRSLRLSCAASGFTFDDYTMHWVRQAPGKGLEWVSDISWNSGSRGYADSVKGRFTISRDNAENSLYLQMNSLRAEDTALYYCAKDKSGYGHYYYYAMDVWGQGTTVTVSS

SEQ ID NO: 1531 - DNA, 24 bp, synthetic construct
  misc_feature 1..24: note = Description of Artificial Sequence: Synthetic oligonucleotide
  source 1..24: mol_type = other DNA
ggattcacctttgatgattatacc

SEQ ID NO: 1532 - protein, 8 aa, synthetic construct
  REGION 1..8: note = Description of Artificial Sequence: Synthetic peptide
GFTFDDYT

SEQ ID NO: 1533 - DNA, 24 bp, synthetic construct
  misc_feature 1..24: note = Description of Artificial Sequence: Synthetic oligonucleotide
  source 1..24: mol_type = other DNA
attagttggaatagtggtagcaga

SEQ ID NO: 1534 - protein, 8 aa, synthetic construct
  REGION 1..8: note = Description of Artificial Sequence: Synthetic peptide
ISWNSGSR

SEQ ID NO: 1535 - DNA, 51 bp, synthetic construct
  misc_feature 1..51: note = Description of Artificial Sequence: Synthetic oligonucleotide
  source 1..51: mol_type = other DNA
gcaaaagataaaagtggctacggccactactactactacgctatggacgtc

SEQ ID NO: 1536 - protein, 17 aa, synthetic construct
  REGION 1..17: note = Description of Artificial Sequence: Synthetic peptide
AKDKSGYGHYYYYAMDV

SEQ ID NO: 1537 - DNA, 372 bp, synthetic construct
  misc_feature 1..372: note = Description of Artificial Sequence: Synthetic polynucleotide
  source 1..372: mol_type = other DNA
gaggtgcagctggtggagtctgggggaggcttggtacagcctggcgggtccctgagactctcctgtgaagcctctggattcacctttgctgattataccttgcactgggtccggcaagctccagggaagggcctggaatgggtctcagatattagttggaatagtggcaccagaggctatgcggactctgtgaggggccgattcaccatctccagagacaacgccaagaagtccctgtatctgcaaatgaacagtctgagatctgaggacacggccttgtattactgtgtgaaagatggaagtggctacgggagatataatttctacgctatggacgtctggggccaagggaccacggtcaccgtctcctca

SEQ ID NO: 1538 - protein, 124 aa, synthetic construct
  REGION 1..124: note = Description of Artificial Sequence: Synthetic polypeptide
EVQLVESGGGLVQPGGSLRLSCEASGFTFADYTLHWVRQAPGKGLEWVSDISWNSGTRGYADSVRGRFTISRDNAKKSLYLQMNSLRSEDTALYYCVKDGSGYGRYNFYAMDVWGQGTTVTVSS

SEQ ID NO: 1539 - DNA, 24 bp, synthetic construct
  misc_feature 1..24: note = Description of Artificial Sequence: Synthetic oligonucleotide
  source 1..24: mol_type = other DNA
ggattcacctttgctgattatacc

SEQ ID NO: 1540 - protein, 8 aa, synthetic construct
  REGION 1..8: note = Description of Artificial Sequence: Synthetic peptide
GFTFADYT

SEQ ID NO: 1541 - DNA, 24 bp, synthetic construct
  misc_feature 1..24: note = Description of Artificial Sequence: Synthetic oligonucleotide
  source 1..24: mol_type = other DNA
attagttggaatagtggcaccaga

SEQ ID NO: 1542 - protein, 8 aa, synthetic construct
  REGION 1..8: note = Description of Artificial Sequence: Synthetic peptide
ISWNSGTR

SEQ ID NO: 1543 - DNA, 51 bp, synthetic construct
  misc_feature 1..51: note = Description of Artificial Sequence: Synthetic oligonucleotide
  source 1..51: mol_type = other DNA
gtgaaagatggaagtggctacgggagatataatttctacgctatggacgtc

SEQ ID NO: 1544 - protein, 17 aa, synthetic construct
  REGION 1..17: note = Description of Artificial Sequence: Synthetic peptide
VKDGSGYGRYNFYAMDV

SEQ ID NO: 1545 - DNA, 369 bp, synthetic construct
  misc_feature 1..369: note = Description of Artificial Sequence: Synthetic polynucleotide
  source 1..369: mol_type = other DNA
gaggtgcagctggtggagtctgggggaggcttggttcagcctggcaggtccctgagactctcctgtgcagcctctggatttacctttgctgactataccatgcactgggtccggcaaggtccagggaagggcctggagtgggtctcagatattggttggaatagtaatactataggctatgcggactctgtgaagggccgattcgccatctccagagacaacgccaagaactccctgtatcttcaaatgaacagtctgcgacctgaggacacggccttatattactgtgtaaaggataaaagtggctacgggaaattccaatacggtttggacgtctggggccaagggaccacggtcaccgtctcctca

SEQ ID NO: 1546 - protein, 123 aa, synthetic construct
  REGION 1..123: note = Description of Artificial Sequence: Synthetic polypeptide
EVQLVESGGGLVQPGRSLRLSCAASGFTFADYTMHWVRQGPGKGLEWVSDIGWNSNTIGYADSVKGRFAISRDNAKNSLYLQMNSLRPEDTALYYCVKDKSGYGKFQYGLDVWGQGTTVTVSS

SEQ ID NO: 1547 - DNA, 24 bp, synthetic construct
  misc_feature 1..24: note = Description of Artificial Sequence: Synthetic oligonucleotide
  source 1..24: mol_type = other DNA
ggatttacctttgctgactatacc

SEQ ID NO: 1548 - protein, 8 aa, synthetic construct
  REGION 1..8: note = Description of Artificial Sequence: Synthetic peptide
GFTFADYT

SEQ ID NO: 1549 - DNA, 24 bp, synthetic construct
  misc_feature 1..24: note = Description of Artificial Sequence: Synthetic oligonucleotide
  source 1..24: mol_type = other DNA
attggttggaatagtaatactata

SEQ ID NO: 1550 - protein, 8 aa, synthetic construct
  REGION 1..8: note = Description of Artificial Sequence: Synthetic peptide
IGWNSNTI

SEQ ID NO: 1551 - DNA, 48 bp, synthetic construct
  misc_feature 1..48: note = Description of Artificial Sequence: Synthetic oligonucleotide
  source 1..48: mol_type = other DNA
gtaaaggataaaagtggctacgggaaattccaatacggtttggacgtc

SEQ ID NO: 1552 - protein, 16 aa, synthetic construct
  REGION 1..16: note = Description of Artificial Sequence: Synthetic peptide
VKDKSGYGKFQYGLDV

SEQ ID NO: 1553 - DNA, 369 bp, synthetic construct
  misc_feature 1..369: note = Description of Artificial Sequence: Synthetic polynucleotide
  source 1..369: mol_type = other DNA
gaggtgcagctggtggagtctgggggaggcttggtacagcctggcaggtccctgagactctcctgtgcagcctctggatttacatttgacgattataccatgcactgggtccggcaaggtccagggaagggcctggagtgggtctcagatattggttggaatagtaacagtataggctatgcggactctgtgaagggccgattcaccatctccagagacaacgccaagaactccctgtatctccaaatgaacagtctgagacctgaggacacggccttgtatttctgtgtaaaggataaaagtggctacgggaaatttttcatcggtttggacgtctggggccaagggacaatggtcaccgtctcttca

SEQ ID NO: 1554 - protein, 123 aa, synthetic construct
  REGION 1..123: note = Description of Artificial Sequence: Synthetic polypeptide
EVQLVESGGGLVQPGRSLRLSCAASGFTFDDYTMHWVRQGPGKGLEWVSDIGWNSNSIGYADSVKGRFTISRDNAKNSLYLQMNSLRPEDTALYFCVKDKSGYGKFFIGLDVWGQGTMVTVSS

SEQ ID NO: 1555 - DNA, 24 bp, synthetic construct
  misc_feature 1..24: note = Description of Artificial Sequence: Synthetic oligonucleotide
  source 1..24: mol_type = other DNA
ggatttacatttgacgattatacc

SEQ ID NO: 1556 - protein, 8 aa, synthetic construct
  REGION 1..8: note = Description of Artificial Sequence: Synthetic peptide
GFTFDDYT

SEQ ID NO: 1557 - DNA, 24 bp, synthetic construct
  misc_feature 1..24: note = Description of Artificial Sequence: Synthetic oligonucleotide
  source 1..24: mol_type = other DNA
attggttggaatagtaacagtata

SEQ ID NO: 1558 - protein, 8 aa, synthetic construct
  REGION 1..8: note = Description of Artificial Sequence: Synthetic peptide
IGWNSNSI

SEQ ID NO: 1559 - DNA, 48 bp, synthetic construct
  misc_feature 1..48: note = Description of Artificial Sequence: Synthetic oligonucleotide
  source 1..48: mol_type = other DNA
gtaaaggataaaagtggctacgggaaatttttcatcggtttggacgtc

SEQ ID NO: 1560 - protein, 16 aa, synthetic construct
  REGION 1..16: note = Description of Artificial Sequence: Synthetic peptide
VKDKSGYGKFFIGLDV

SEQ ID NO: 1561 - DNA, 369 bp, synthetic construct
  misc_feature 1..369: note = Description of Artificial Sequence: Synthetic polynucleotide
  source 1..369: mol_type = other DNA
caggtgcagttggtggagtctgggggaggcttggtacagcctggcaggtccctgagactctcctgtgcagcctctggatttacatttgacgattataccatgcactgggtccggcaaggtccagggaagggcctggagtgggtctcagatattggttggaatagtaatactaaaggctatgcggactctgtgaagggccgattcaccatctccagagacaacgccaagaattccctgtatctccaaatgaacagtctgagacctgaggacacggccttgtatttctgtgtgaaggataaaagtggctacgggaaatttttcatcggtttggacgtctggggccaagggacaatggtcaccgtctcttca

SEQ ID NO: 1562 - protein, 123 aa, synthetic construct
  REGION 1..123: note = Description of Artificial Sequence: Synthetic polypeptide
QVQLVESGGGLVQPGRSLRLSCAASGFTFDDYTMHWVRQGPGKGLEWVSDIGWNSNTKGYADSVKGRFTISRDNAKNSLYLQMNSLRPEDTALYFCVKDKSGYGKFFIGLDVWGQGTMVTVSS

SEQ ID NO: 1563 - DNA, 24 bp, synthetic construct
  misc_feature 1..24: note = Description of Artificial Sequence: Synthetic oligonucleotide
  source 1..24: mol_type = other DNA
ggatttacatttgacgattatacc

SEQ ID NO: 1564 - protein, 8 aa, synthetic construct
  REGION 1..8: note = Description of Artificial Sequence: Synthetic peptide
GFTFDDYT

SEQ ID NO: 1565 - DNA, 24 bp, synthetic construct
  misc_feature 1..24: note = Description of Artificial Sequence: Synthetic oligonucleotide
  source 1..24: mol_type = other DNA
attggttggaatagtaatactaaa

SEQ ID NO: 1566 - protein, 8 aa, synthetic construct
  REGION 1..8: note = Description of Artificial Sequence: Synthetic peptide
IGWNSNTK

SEQ ID NO: 1567 - DNA, 48 bp, synthetic construct
  misc_feature 1..48: note = Description of Artificial Sequence: Synthetic oligonucleotide
  source 1..48: mol_type = other DNA
gtgaaggataaaagtggctacgggaaatttttcatcggtttggacgtc

SEQ ID NO: 1568 - protein, 16 aa, synthetic construct
  REGION 1..16: note = Description of Artificial Sequence: Synthetic peptide
VKDKSGYGKFFIGLDV

SEQ ID NO: 1569 - DNA, 369 bp, synthetic construct
  misc_feature 1..369: note = Description of Artificial Sequence: Synthetic polynucleotide
  source 1..369: mol_type = other DNA
gaggtgcagctggtggagtctgggggaggcttggtccagcctgggcggtccctgagactctcctgtgcagcctccggattcacctttgctgattataccatgcactgggtccggcaaggtccagggacgggcctggagtgggtctcagatattggttggagtggtggtagtttaggctatgcggactctgtgaagggccgattcaccatctccagagacaacgccaagaactccctgtatttggaaatgaacaatctgcgacctgaagacacggccttgtattattgtgtaaaggataaaagtggctacgggaaattccagtacggtttggacgtctggggccaagggaccacggtcaccgtctcctca

SEQ ID NO: 1570 - protein, 123 aa, synthetic construct
  REGION 1..123: note = Description of Artificial Sequence: Synthetic polypeptide
EVQLVESGGGLVQPGRSLRLSCAASGFTFADYTMHWVRQGPGTGLEWVSDIGWSGGSLGYADSVKGRFTISRDNAKNSLYLEMNNLRPEDTALYYCVKDKSGYGKFQYGLDVWGQGTTVTVSS

SEQ ID NO: 1571 - DNA, 24 bp, synthetic construct
  misc_feature 1..24: note = Description of Artificial Sequence: Synthetic oligonucleotide
  source 1..24: mol_type = other DNA
ggattcacctttgctgattatacc

SEQ ID NO: 1572 - protein, 8 aa, synthetic construct
  REGION 1..8: note = Description of Artificial Sequence: Synthetic peptide
GFTFADYT

SEQ ID NO: 1573 - DNA, 24 bp, synthetic construct
  misc_feature 1..24: note = Description of Artificial Sequence: Synthetic oligonucleotide
  source 1..24: mol_type = other DNA
attggttggagtggtggtagttta

SEQ ID NO: 1574 - protein, 8 aa, synthetic construct
  REGION 1..8: note = Description of Artificial Sequence: Synthetic peptide
IGWSGGSL

SEQ ID NO: 1575 - DNA, 48 bp, synthetic construct
  misc_feature 1..48: note = Description of Artificial Sequence: Synthetic oligonucleotide
  source 1..48: mol_type = other DNA
gtaaaggataaaagtggctacgggaaattccagtacggtttggacgtc

SEQ ID NO: 1576 - protein, 16 aa, synthetic construct
  REGION 1..16: note = Description of Artificial Sequence: Synthetic peptide
VKDKSGYGKFQYGLDV

SEQ ID NO: 1577 - DNA, 369 bp, synthetic construct
  misc_feature 1..369: note = Description of Artificial Sequence: Synthetic polynucleotide
  source 1..369: mol_type = other DNA
gaggtgcagctggtggagtctgggggaggcgtggtacagcctggcaggtccctgagactctcctgtgcagcctctgggtttaaatttgatggttataccatgcactgggtccggcaaggtccagggaagggcctggagtgggtctcagatattggttggaatagtaacactataggctatgcggactctgtgaagggccgattcaccatctccagagacaacgccaagaactccctgtatctccaaatgaacagtctgagaccagaggacacggccttgtatttctgtgtaaaggataaaagtggctacgggaaatttttcatcggtttggacgtctggggccaagggacaatggtcaccgtctcttca

SEQ ID NO: 1578 - protein, 123 aa, synthetic construct
  REGION 1..123: note = Description of Artificial Sequence: Synthetic polypeptide
EVQLVESGGGVVQPGRSLRLSCAASGFKFDGYTMHWVRQGPGKGLEWVSDIGWNSNTIGYADSVKGRFTISRDNAKNSLYLQMNSLRPEDTALYFCVKDKSGYGKFFIGLDVWGQGTMVTVSS

SEQ ID NO: 1579 - DNA, 24 bp, synthetic construct
  misc_feature 1..24: note = Description of Artificial Sequence: Synthetic oligonucleotide
  source 1..24: mol_type = other DNA
gggtttaaatttgatggttatacc

SEQ ID NO: 1580 - protein, 8 aa, synthetic construct
  REGION 1..8: note = Description of Artificial Sequence: Synthetic peptide
GFKFDGYT

SEQ ID NO: 1581 - DNA, 24 bp, synthetic construct
  misc_feature 1..24: note = Description of Artificial Sequence: Synthetic oligonucleotide
  source 1..24: mol_type = other DNA
attggttggaatagtaacactata

SEQ ID NO: 1582 - protein, 8 aa, synthetic construct
  REGION 1..8: note = Description of Artificial Sequence: Synthetic peptide
IGWNSNTI

SEQ ID NO: 1583 - DNA, 48 bp, synthetic construct; identical to SEQ ID NO: 1559
  misc_feature 1..48: note = Description of Artificial Sequence: Synthetic oligonucleotide
  source 1..48: mol_type = other DNA

SEQ ID NO: 1584 - protein, 16 aa, synthetic construct
  REGION 1..16: note = Description of Artificial Sequence: Synthetic peptide
VKDKSGYGKFFIGLDV

SEQ ID NO: 1585 - DNA, 369 bp, synthetic construct
  misc_feature 1..369: note = Description of Artificial Sequence: Synthetic polynucleotide
  source 1..369: mol_type = other DNA
caggtgcagctggtggagtctgggggaggcttggtacagcctggcaggtccctgagactctcctgtgcagcctctggattcacctttgatgattataccatgcactgggtccggcaaggtccagggaagggcctggagtgggtctcagatattggttggaatagtaatactataggctatgcggactctgtgaagggccgattcaccatctccagagacaacgccaggaactccctgtatctgcaaatgaacagtctgcgacctgaagacacggccttatattactgtgtaaaggataaaagtggctacgggaaattccaatacggtttggacgtctggggccaagggaccacggtcaccgtctcctca

SEQ ID NO: 1586 - protein, 123 aa, synthetic construct
  REGION 1..123: note = Description of Artificial Sequence: Synthetic polypeptide
QVQLVESGGGLVQPGRSLRLSCAASGFTFDDYTMHWVRQGPGKGLEWVSDIGWNSNTIGYADSVKGRFTISRDNARNSLYLQMNSLRPEDTALYYCVKDKSGYGKFQYGLDVWGQGTTVTVSS

SEQ ID NO: 1587 - DNA, 24 bp, synthetic construct
  misc_feature 1..24: note = Description of Artificial Sequence: Synthetic oligonucleotide
  source 1..24: mol_type = other DNA
ggattcacctttgatgattatacc

SEQ ID NO: 1588 - protein, 8 aa, synthetic construct
  REGION 1..8: note = Description of Artificial Sequence: Synthetic peptide
GFTFDDYT

SEQ ID NO: 1589 - DNA, 24 bp, synthetic construct
  misc_feature 1..24: note = Description of Artificial Sequence: Synthetic oligonucleotide
  source 1..24: mol_type = other DNA
attggttggaatagtaatactata

SEQ ID NO: 1590 - protein, 8 aa, synthetic construct
  REGION 1..8: note = Description of Artificial Sequence: Synthetic peptide
IGWNSNTI

SEQ ID NO: 1591 - DNA, 48 bp, synthetic construct; identical to SEQ ID NO: 1551
  misc_feature 1..48: note = Description of Artificial Sequence: Synthetic oligonucleotide
  source 1..48: mol_type = other DNA

SEQ ID NO: 1592 - protein, 16 aa, synthetic construct
  REGION 1..16: note = Description of Artificial Sequence: Synthetic peptide
VKDKSGYGKFQYGLDV

SEQ ID NO: 1593 - DNA, 369 bp, synthetic construct
  misc_feature 1..369: note = Description of Artificial Sequence: Synthetic polynucleotide
  source 1..369: mol_type = other DNA
caggtgcaactggtggagtctgggggaggcttggtacagcctggcaggtccctgagactctcctgtgcagcctctggattcaagtttgatgattataccatgcactgggtccggcaaggtccagggaagggcctggagtgggtctcagacattagttggagtggtggtagcatagactatacggactctgtgaagggccgattctccatctccagagacaacgccaagaactccctgtatctgcaaatgaacagtctgagagttgaagacacggccttgtattattgtgtaaaagataaaagtggctacgggaagtactcttacggtttggacgtctggggccaagggaccacggtcaccgtctcctca

SEQ ID NO: 1594 - protein, 123 aa, synthetic construct
  REGION 1..123: note = Description of Artificial Sequence: Synthetic polypeptide
QVQLVESGGGLVQPGRSLRLSCAASGFKFDDYTMHWVRQGPGKGLEWVSDISWSGGSIDYTDSVKGRFSISRDNAKNSLYLQMNSLRVEDTALYYCVKDKSGYGKYSYGLDVWGQGTTVTVSS

SEQ ID NO: 1595 - DNA, 24 bp, synthetic construct
  misc_feature 1..24: note = Description of Artificial Sequence: Synthetic oligonucleotide
  source 1..24: mol_type = other DNA
ggattcaagtttgatgattatacc

SEQ ID NO: 1596 - protein, 8 aa, synthetic construct
  REGION 1..8: note = Description of Artificial Sequence: Synthetic peptide
GFKFDDYT

SEQ ID NO: 1597 - DNA, 24 bp, synthetic construct
  misc_feature 1..24: note = Description of Artificial Sequence: Synthetic oligonucleotide
  source 1..24: mol_type = other DNA
attagttggagtggtggtagcata

SEQ ID NO: 1598 - protein, 8 aa, synthetic construct
  REGION 1..8: note = Description of Artificial Sequence: Synthetic peptide
ISWSGGSI

SEQ ID NO: 1599 - DNA, 48 bp, synthetic construct
  misc_feature 1..48: note = Description of Artificial Sequence: Synthetic oligonucleotide
  source 1..48: mol_type = other DNA
gtaaaagataaaagtggctacgggaagtactcttacggtttggacgtc

SEQ ID NO: 1600 - protein, 16 aa, synthetic construct
  REGION 1..16: note = Description of Artificial Sequence: Synthetic peptide
VKDKSGYGKYSYGLDV

SEQ ID NO: 1601 - DNA, 357 bp, synthetic construct
  misc_feature 1..357: note = Description of Artificial Sequence: Synthetic polynucleotide
  source 1..357: mol_type = other DNA
gaggtgcagctggtggagtctgggggaggcttggtaaagccgggggggtcccttagaatctcctgtgcagcctctggattctctttcattaacgcctggatgaactgggtccgccaggctccagggaaggggctggagtgggttggccgtattaaaagcataagtgatggtgggacaacagactacgctgcatccgtgaaaggcagattcaccatctcaagagaagattcaaaaaatatgctgtttctggaaatgaatagtctgaaaaccgaggacacagccgtgttttactgtaccacagaggtcgctagaactccgaactactggggccggggaaccctggtcaccgtctcctca

SEQ ID NO: 1602 - protein, 119 aa, synthetic construct
  REGION 1..119: note = Description of Artificial Sequence: Synthetic polypeptide
EVQLVESGGGLVKPGGSLRISCAASGFSFINAWMNWVRQAPGKGLEWVGRIKSISDGGTTDYAASVKGRFTISREDSKNMLFLEMNSLKTEDTAVFYCTTEVARTPNYWGRGTLVTVSS

SEQ ID NO: 1603 - DNA, 24 bp, synthetic construct
  misc_feature 1..24: note = Description of Artificial Sequence: Synthetic oligonucleotide
  source 1..24: mol_type = other DNA
ggattctctttcattaacgcctgg

SEQ ID NO: 1604 - protein, 8 aa, synthetic construct
  REGION 1..8: note = Description of Artificial Sequence: Synthetic peptide
GFSFINAW

SEQ ID NO: 1605 - DNA, 30 bp, synthetic construct
  misc_feature 1..30: note = Description of Artificial Sequence: Synthetic oligonucleotide
  source 1..30: mol_type = other DNA
attaaaagcataagtgatggtgggacaaca

SEQ ID NO: 1606 - protein, 10 aa, synthetic construct
  REGION 1..10: note = Description of Artificial Sequence: Synthetic peptide
IKSISDGGTT

SEQ ID NO: 1607 - DNA, 30 bp, synthetic construct
  misc_feature 1..30: note = Description of Artificial Sequence: Synthetic oligonucleotide
  source 1..30: mol_type = other DNA
accacagaggtcgctagaactccgaactac

SEQ ID NO: 1608 - protein, 10 aa, synthetic construct
  REGION 1..10: note = Description of Artificial Sequence: Synthetic peptide
TTEVARTPNY

SEQ ID NO: 1609 - DNA, 372 bp, synthetic construct
  misc_feature 1..372: note = Description of Artificial Sequence: Synthetic polynucleotide
  source 1..372: mol_type = other DNA
gaagtacagcttgtagaatccggcggaggactggtacaacctggaagaagtcttagactgagttgcgcagctagtgggtttacattcgacgattacagcatgcattgggtgaggcaagctcctggtaaaggattggaatgggttagcgggatatcatggaactcaggaagcaagggatacgccgacagcgtgaaaggccgatttacaatatctagggacaacgcaaaaaactctctctaccttcaaatgaactctcttagggcagaagacacagcattgtattattgcgcaaaatacggcagtggttatggcaagttttatcattatggactggacgtgtggggacaagggacaacagtgacagtgagtagc

SEQ ID NO: 1610 - protein, 124 aa, synthetic construct
  REGION 1..124: note = Description of Artificial Sequence: Synthetic polypeptide
EVQLVESGGGLVQPGRSLRLSCAASGFTFDDYSMHWVRQAPGKGLEWVSGISWNSGSKGYADSVKGRFTISRDNAKNSLYLQMNSLRAEDTALYYCAKYGSGYGKFYHYGLDVWGQGTTVTVSS

SEQ ID NO: 1611 - DNA, 24 bp, synthetic construct
  misc_feature 1..24: note = Description of Artificial Sequence: Synthetic oligonucleotide
  source 1..24: mol_type = other DNA
gggtttacattcgacgattacagc

SEQ ID NO: 1612 - protein, 8 aa, synthetic construct
  REGION 1..8: note = Description of Artificial Sequence: Synthetic peptide
GFTFDDYS

SEQ ID NO: 1613 - DNA, 24 bp, synthetic construct
  misc_feature 1..24: note = Description of Artificial Sequence: Synthetic oligonucleotide
  source 1..24: mol_type = other DNA
atatcatggaactcaggaagcaag

SEQ ID NO: 1614 - protein, 8 aa, synthetic construct
  REGION 1..8: note = Description of Artificial Sequence: Synthetic peptide
ISWNSGSK

SEQ ID NO: 1615 - DNA, 51 bp, synthetic construct
  misc_feature 1..51: note = Description of Artificial Sequence: Synthetic oligonucleotide
  source 1..51: mol_type = other DNA
gcaaaatacggcagtggttatggcaagttttatcattatggactggacgtg

SEQ ID NO: 1616 - protein, 17 aa, synthetic construct
  REGION 1..17: note = Description of Artificial Sequence: Synthetic peptide
AKYGSGYGKFYHYGLDV

SEQ ID NO: 1617 - DNA, 372 bp, synthetic construct
  misc_feature 1..372: note = Description of Artificial Sequence: Synthetic polynucleotide
  source 1..372: mol_type = other DNA
gaagtacaactggtcgaatctggaggaggtcttgttcaacctggtcgatcacttcgcctttcttgtgccgcttctggtttcactttcgacgattatagcatgcattgggtacgacaggctcccggaaaagggctggaatgggtgtcaggaattagttggaactcaggaagtattggatacgctgattcagtcaaaggacgcttcacaatctcaagggacaacgctaaaaactcactttatttgcaaatgaactctctccgcgctgaagataccgctctctattattgcgccaaagatgggtctggttacggttatttttactactatggaatggacgtttggggccaaggaacaactgtcacagtatcatcc

SEQ ID NO: 1618 - protein, 124 aa, synthetic construct
  REGION 1..124: note = Description of Artificial Sequence: Synthetic polypeptide
EVQLVESGGGLVQPGRSLRLSCAASGFTFDDYSMHWVRQAPGKGLEWVSGISWNSGSIGYADSVKGRFTISRDNAKNSLYLQMNSLRAEDTALYYCAKDGSGYGYFYYYGMDVWGQGTTVTVSS

SEQ ID NO: 1619 - DNA, 24 bp, synthetic construct
  misc_feature 1..24: note = Description of Artificial Sequence: Synthetic oligonucleotide
  source 1..24: mol_type = other DNA
ggtttcactttcgacgattatagc

SEQ ID NO: 1620 - protein, 8 aa, synthetic construct
  REGION 1..8: note = Description of Artificial Sequence: Synthetic peptide
GFTFDDYS

SEQ ID NO: 1621 - DNA, 24 bp, synthetic construct
  misc_feature 1..24: note = Description of Artificial Sequence: Synthetic oligonucleotide
  source 1..24: mol_type = other DNA
attagttggaactcaggaagtatt

SEQ ID NO: 1622 - protein, 8 aa, synthetic construct
  REGION 1..8: note = Description of Artificial Sequence: Synthetic peptide
ISWNSGSI

SEQ ID NO: 1623 - DNA, 51 bp, synthetic construct
  misc_feature 1..51: note = Description of Artificial Sequence: Synthetic oligonucleotide
  source 1..51: mol_type = other DNA
gccaaagatgggtctggttacggttatttttactactatggaatggacgtt

SEQ ID NO: 1624 - protein, 17 aa, synthetic construct
  REGION 1..17: note = Description of Artificial Sequence: Synthetic peptide
AKDGSGYGYFYYYGMDV

SEQ ID NO: 1625 - DNA, 372 bp, synthetic construct
  misc_feature 1..372: note = Description of Artificial Sequence: Synthetic polynucleotide
  source 1..372: mol_type = other DNA
gaagtgcaactcgttgaaagcggaggaggactggtccagcccggcagatctctcagattgtcttgcgctgcatccggatttacatttgacgactattcaatgcactgggtacggcaagccccaggtaaaggactcgaatgggtaagcggcatatcttggaactcaggcagtattggctacgcagattcagtaaaaggaagattcactatttcaagggataatgctaagaacagtctctacttgcaaatgaatagcttgcgcgcagaagatacagcactttattattgtgcaaaagatggaagcggttatgggaaattttattattatggtatggatgtatggggtcaaggtacaacagttactgtgtcaagt

SEQ ID NO: 1626 - protein, 124 aa, synthetic construct
  REGION 1..124: note = Description of Artificial Sequence: Synthetic polypeptide
EVQLVESGGGLVQPGRSLRLSCAASGFTFDDYSMHWVRQAPGKGLEWVSGISWNSGSIGYADSVKGRFTISRDNAKNSLYLQMNSLRAEDTALYYCAKDGSGYGKFYYYGMDVWGQGTTVTVSS

SEQ ID NO: 1627 - DNA, 24 bp, synthetic construct
  misc_feature 1..24: note = Description of Artificial Sequence: Synthetic oligonucleotide
  source 1..24: mol_type = other DNA
ggatttacatttgacgactattca

SEQ ID NO: 1628 - protein, 8 aa, synthetic construct
  REGION 1..8: note = Description of Artificial Sequence: Synthetic peptide
GFTFDDYS

SEQ ID NO: 1629 - DNA, 24 bp, synthetic construct
  misc_feature 1..24: note = Description of Artificial Sequence: Synthetic oligonucleotide
  source 1..24: mol_type = other DNA
atatcttggaactcaggcagtatt

SEQ ID NO: 1630 - protein, 8 aa, synthetic construct
  REGION 1..8: note = Description of Artificial Sequence: Synthetic peptide
ISWNSGSI

SEQ ID NO: 1631 - DNA, 51 bp, synthetic construct
  misc_feature 1..51: note = Description of Artificial Sequence: Synthetic oligonucleotide
  source 1..51: mol_type = other DNA
gcaaaagatggaagcggttatgggaaattttattattatggtatggatgta

SEQ ID NO: 1632 - protein, 17 aa, synthetic construct
  REGION 1..17: note = Description of Artificial Sequence: Synthetic peptide
AKDGSGYGKFYYYGMDV

SEQ ID NO: 1633 - DNA, 324 bp, synthetic construct; identical to SEQ ID NO: 57
  misc_feature 1..324: note = Description of Artificial Sequence: Synthetic polynucleotide
  source 1..324: mol_type = other DNA

SEQ ID NO: 1634 - protein, 108 aa, synthetic construct; identical to SEQ ID NO: 58
  REGION 1..108: note = Description of Artificial Sequence: Synthetic polypeptide

SEQ ID NO: 1635 - DNA, 18 bp, synthetic construct
  misc_feature 1..18: note = Description of Artificial Sequence: Synthetic oligonucleotide
  source 1..18: mol_type = other DNA
cagagcattagcagctat

SEQ ID NO: 1636 - protein, 6 aa, synthetic construct
  REGION 1..6: note = Description of Artificial Sequence: Synthetic peptide
QSISSY

SEQ ID NO: 1637-1638 - skipped (2 entries)

SEQ ID NO: 1639 - DNA, 30 bp, synthetic construct; identical to SEQ ID NO: 15
  misc_feature 1..30: note = Description of Artificial Sequence: Synthetic oligonucleotide
  source 1..30: mol_type = other DNA

SEQ ID NO: 1640 - protein, 10 aa, synthetic construct
  REGION 1..10: note = Description of Artificial Sequence: Synthetic peptide
QQSYSTPPIT

SEQ ID NO: 1641 - DNA, 369 bp, synthetic construct; identical to SEQ ID NO: 513
  misc_feature 1..369: note = Description of Artificial Sequence: Synthetic polynucleotide
  source 1..369: mol_type = other DNA

SEQ ID NO: 1642 - protein, 123 aa, synthetic construct; identical to SEQ ID NO: 514
  REGION 1..123: note = Description of Artificial Sequence: Synthetic polypeptide

SEQ ID NO: 1643 - DNA, 24 bp, synthetic construct
  misc_feature 1..24: note = Description of Artificial Sequence: Synthetic oligonucleotide
  source 1..24: mol_type = other DNA
ggattcacctttgatgattatacc

SEQ ID NO: 1644 - protein, 8 aa, synthetic construct
  REGION 1..8: note = Description of Artificial Sequence: Synthetic peptide
GFTFDDYT

SEQ ID NO: 1645 - DNA, 24 bp, synthetic construct
  misc_feature 1..24: note = Description of Artificial Sequence: Synthetic oligonucleotide
  source 1..24: mol_type = other DNA
attagttggaatagtggtagtata

SEQ ID NO: 1646 - protein, 8 aa, synthetic construct
  REGION 1..8: note = Description of Artificial Sequence: Synthetic peptide
ISWNSGSI

SEQ ID NO: 1647 - DNA, 48 bp, synthetic construct; identical to SEQ ID NO: 519
  misc_feature 1..48: note = Description of Artificial Sequence: Synthetic oligonucleotide
  source 1..48: mol_type = other DNA

SEQ ID NO: 1648 - protein, 16 aa, synthetic construct
  REGION 1..16: note = Description of Artificial Sequence: Synthetic peptide
AKDNSGYGHYYYGMDV

SEQ ID NO: 1649 - DNA, 320 bp, synthetic construct
  misc_feature 1..320: note = Description of Artificial Sequence: Synthetic polynucleotide
  source 1..320: mol_type = other DNA
gaaatagtgatgacgcagtctccagccaccctgtctgtgtctccaggggaaagagccaccctctcctgcagggccagtcagagtgttagcagcaacttagcctggtaccagcaaaaacctggccaggctcccaggctcctcatctatggtgcatccaccagggccactggtatcccagccaggttcagtggcagtgggtctgggacagagttcactctcaccatcagcagcctgcagtctgaagattttgcagtttattactgtcagcactatattaactggcctctcactttcggcggagggaccaaggtggagatcaa

SEQ ID NO: 1650 - protein, 108 aa, synthetic construct
  REGION 1..108: note = Description of Artificial Sequence: Synthetic polypeptide
AEIVMTQSPATLSVSPGERATLSCRASQSVSSNLAWYQQKPGQAPRLLIYGASTRATGIPARFSGSGSGTEFTLTISSLQSEDFAVYYCQHYINWPLTFGGGTKVEIK

SEQ ID NO: 1651 - DNA, 18 bp, synthetic construct
  misc_feature 1..18: note = Description of Artificial Sequence: Synthetic oligonucleotide
  source 1..18: mol_type = other DNA
cagagtgttagcagcaac

SEQ ID NO: 1652 - protein, 6 aa, synthetic construct
  REGION 1..6: note = Description of Artificial Sequence: Synthetic peptide
QSVSSN

SEQ ID NO: 1653-1654 - skipped (2 entries)

SEQ ID NO: 1655 - DNA, 27 bp, synthetic construct
  misc_feature 1..27: note = Description of Artificial Sequence: Synthetic oligonucleotide
  source 1..27: mol_type = other DNA
cagcactatattaactggcctctcact

SEQ ID NO: 1656 - protein, 9 aa, synthetic construct
  REGION 1..9: note = Description of Artificial Sequence: Synthetic peptide
QHYINWPLT

SEQ ID NO: 1657 - DNA, 369 bp, synthetic construct; identical to SEQ ID NO: 401
  misc_feature 1..369: note = Description of Artificial Sequence: Synthetic polynucleotide
  source 1..369: mol_type = other DNA

SEQ ID NO: 1658 - protein, 123 aa, synthetic construct; identical to SEQ ID NO: 402
  REGION 1..123: note = Description of Artificial Sequence: Synthetic polypeptide

SEQ ID NO: 1659 - DNA, 24 bp, synthetic construct
  misc_feature 1..24: note = Description of Artificial Sequence: Synthetic oligonucleotide
  source 1..24: mol_type = other DNA
ggattcacctttgatgattttacc

SEQ ID NO: 1660 - protein, 8 aa, synthetic construct
  REGION 1..8: note = Description of Artificial Sequence: Synthetic peptide
GFTFDDFT

SEQ ID NO: 1661 - DNA, 24 bp, synthetic construct
  misc_feature 1..24: note = Description of Artificial Sequence: Synthetic oligonucleotide
  source 1..24: mol_type = other DNA
atcagttggaatagtggtagcata

SEQ ID NO: 1662 - protein, 8 aa, synthetic construct
  REGION 1..8: note = Description of Artificial Sequence: Synthetic peptide
ISWNSGSI

SEQ ID NO: 1663 - DNA, 48 bp, synthetic construct; identical to SEQ ID NO: 407
  misc_feature 1..48: note = Description of Artificial Sequence: Synthetic oligonucleotide
  source 1..48: mol_type = other DNA

SEQ ID NO: 1664 - protein, 16 aa, synthetic construct
  REGION 1..16: note = Description of Artificial Sequence: Synthetic peptide
AKDNSGYGYYYYGMDV

SEQ ID NO: 1665 - DNA, 321 bp, synthetic construct; identical to SEQ ID NO: 409
  misc_feature 1..321: note = Description of Artificial Sequence: Synthetic polynucleotide
  source 1..321: mol_type = other DNA

SEQ ID NO: 1666 - protein, 107 aa, synthetic construct; identical to SEQ ID NO: 410
  REGION 1..107: note = Description of Artificial Sequence: Synthetic polypeptide

SEQ ID NO: 1667 - DNA, 18 bp, synthetic construct
  misc_feature 1..18: note = Description of Artificial Sequence: Synthetic oligonucleotide
  source 1..18: mol_type = other DNA
cacagtgttagcaggaac

SEQ ID NO: 1668 - protein, 6 aa, synthetic construct
  REGION 1..6: note = Description of Artificial Sequence: Synthetic peptide
HSVSRN

SEQ ID NO: 1669-1670 - skipped (2 entries)

SEQ ID NO: 1671 - DNA, 27 bp, synthetic construct
  misc_feature 1..27: note = Description of Artificial Sequence: Synthetic oligonucleotide
  source 1..27: mol_type = other DNA
cagcagtataataattggcctctcact

SEQ ID NO: 1672 - protein, 9 aa, synthetic construct
  REGION 1..9: note = Description of Artificial Sequence: Synthetic peptide
QQYNNWPLT

SEQ ID NO: 1673 - DNA, 369 bp, synthetic construct; identical to SEQ ID NO: 513
  misc_feature 1..369: note = Description of Artificial Sequence: Synthetic polynucleotide
  source 1..369: mol_type = other DNA

SEQ ID NO: 1674 - protein, 123 aa, synthetic construct; identical to SEQ ID NO: 514
  REGION 1..123: note = Description of Artificial Sequence: Synthetic polypeptide

SEQ ID NO: 1675 - DNA, 24 bp, synthetic construct
  misc_feature 1..24: note = Description of Artificial Sequence: Synthetic oligonucleotide
  source 1..24: mol_type = other DNA
ggattcacctttgatgattatacc

SEQ ID NO: 1676 - protein, 8 aa, synthetic construct
  REGION 1..8: note = Description of Artificial Sequence: Synthetic peptide
GFTFDDYT

SEQ ID NO: 1677 - DNA, 24 bp, synthetic construct
  misc_feature 1..24: note = Description of Artificial Sequence: Synthetic oligonucleotide
  source 1..24: mol_type = other DNA
attagttggaatagtggtagtata

SEQ ID NO: 1678 - protein, 8 aa, synthetic construct
  REGION 1..8: note = Description of Artificial Sequence: Synthetic peptide
ISWNSGSI

SEQ ID NO: 1679 - DNA, 48 bp, synthetic construct; identical to SEQ ID NO: 519
  misc_feature 1..48: note = Description of Artificial Sequence: Synthetic oligonucleotide
  source 1..48: mol_type = other DNA

SEQ ID NO: 1680 - protein, 16 aa, synthetic construct
  REGION 1..16: note = Description of Artificial Sequence: Synthetic peptide
AKDNSGYGHYYYGMDV

SEQ ID NO: 1681 - DNA, 321 bp, synthetic construct; identical to SEQ ID NO: 521
  misc_feature 1..321: note = Description of Artificial Sequence: Synthetic polynucleotide
  source 1..321: mol_type = other DNA

SEQ ID NO: 1682 - protein, 107 aa, synthetic construct; identical to SEQ ID NO: 522
  REGION 1..107: note = Description of Artificial Sequence: Synthetic polypeptide

SEQ ID NO: 1683 - DNA, 18 bp, synthetic construct
  misc_feature 1..18: note = Description of Artificial Sequence: Synthetic oligonucleotide
  source 1..18: mol_type = other DNA
cagagtgttagcagcaac

SEQ ID NO: 1684 - protein, 6 aa, synthetic construct
  REGION 1..6: note = Description of Artificial Sequence: Synthetic peptide
QSVSSN

SEQ ID NO: 1685-1686 - skipped (2 entries)

SEQ ID NO: 1687 - DNA, 27 bp, synthetic construct
  misc_feature 1..27: note = Description of Artificial Sequence: Synthetic oligonucleotide
  source 1..27: mol_type = other DNA
cagcactatattaactggcctctcact

SEQ ID NO: 1688 - protein, 9 aa, synthetic construct
  REGION 1..9: note = Description of Artificial Sequence: Synthetic peptide
QHYINWPLT

SEQ ID NO: 1689 - DNA, 354 bp, synthetic construct; identical to SEQ ID NO: 577
  misc_feature 1..354: note = Description of Artificial Sequence: Synthetic polynucleotide
  source 1..354: mol_type = other DNA

SEQ ID NO: 1690 - protein, 118 aa, synthetic construct; identical to SEQ ID NO: 578
  REGION 1..118: note = Description of Artificial Sequence: Synthetic polypeptide

SEQ ID NO: 1691 - DNA, 24 bp, synthetic construct
  misc_feature 1..24: note = Description of Artificial Sequence: Synthetic oligonucleotide
  source 1..24: mol_type = other DNA
ggatttaccttcagaagttatgcc

SEQ ID NO: 1692 - protein, 8 aa, synthetic construct
  REGION 1..8: note = Description of Artificial Sequence: Synthetic peptide
GFTFRSYA

SEQ ID NO: 1693 - DNA, 24 bp, synthetic construct
  misc_feature 1..24: note = Description of Artificial Sequence: Synthetic oligonucleotide
  source 1..24: mol_type = other DNA
gtatactatgatggaaataatcaa

SEQ ID NO: 1694 - protein, 8 aa, synthetic construct
  REGION 1..8: note = Description of Artificial Sequence: Synthetic peptide
VYYDGNNQ

SEQ ID NO: 1695 - DNA, 33 bp, synthetic construct; identical to SEQ ID NO: 551
  misc_feature 1..33: note = Description of Artificial Sequence: Synthetic oligonucleotide
  source 1..33: mol_type = other DNA

SEQ ID NO: 1696 - protein, 11 aa, synthetic construct
  REGION 1..11: note = Description of Artificial Sequence: Synthetic peptide
ARGPGYNWLDP

SEQ ID NO: 1697 - DNA, 321 bp, synthetic construct; identical to SEQ ID NO: 585
  misc_feature 1..321: note = Description of Artificial Sequence: Synthetic polynucleotide
  source 1..321: mol_type = other DNA

SEQ ID NO: 1698 - protein, 107 aa, synthetic construct; identical to SEQ ID NO: 586
  REGION 1..107: note = Description of Artificial Sequence: Synthetic polypeptide

SEQ ID NO: 1699 - DNA, 18 bp, synthetic construct
  misc_feature 1..18: note = Description of Artificial Sequence: Synthetic oligonucleotide
  source 1..18: mol_type = other DNA
cagagtgttagcaggaac

SEQ ID NO: 1700 - protein, 6 aa, synthetic construct
  REGION 1..6: note = Description of Artificial Sequence: Synthetic peptide
QSVSRN

SEQ ID NO: 1701-1702 - skipped (2 entries)

SEQ ID NO: 1703 - DNA, 27 bp, synthetic construct
  misc_feature 1..27: note = Description of Artificial Sequence: Synthetic oligonucleotide
  source 1..27: mol_type = other DNA
cagcagtataataactggcctctcact

SEQ ID NO: 1704 - protein, 9 aa, synthetic construct
  REGION 1..9: note = Description of Artificial Sequence: Synthetic peptide
QQYNNWPLT

SEQ ID NO: 1705 - DNA, 354 bp, synthetic construct; identical to SEQ ID NO: 561
  misc_feature 1..354: note = Description of Artificial Sequence: Synthetic polynucleotide
  source 1..354: mol_type = other DNA

SEQ ID NO: 1706 - protein, 118 aa, synthetic construct; identical to SEQ ID NO: 562
  REGION 1..118: note = Description of Artificial Sequence: Synthetic polypeptide

SEQ ID NO: 1707 - DNA, 24 bp, synthetic construct
  misc_feature 1..24: note = Description of Artificial Sequence: Synthetic oligonucleotide
  source 1..24: mol_type = other DNA
ggattcaccttcagaagttatggc

SEQ ID NO: 1708 - protein, 8 aa, synthetic construct
  REGION 1..8: note = Description of Artificial Sequence: Synthetic peptide
GFTFRSYG

SEQ ID NO: 1709 - DNA, 24 bp, synthetic construct
  misc_feature 1..24: note = Description of Artificial Sequence: Synthetic oligonucleotide
  source 1..24: mol_type = other DNA
atttactatgatggtaagaataaa

SEQ ID NO: 1710 - protein, 8 aa, synthetic construct
  REGION 1..8: note = Description of Artificial Sequence: Synthetic peptide
IYYDGKNK

SEQ ID NO: 1711 - DNA, 33 bp, synthetic construct; identical to SEQ ID NO: 567
  misc_feature 1..33: note = Description of Artificial Sequence: Synthetic oligonucleotide
  source 1..33: mol_type = other DNA

SEQ ID NO: 1712 - protein, 11 aa, synthetic construct
  REGION 1..11: note = Description of Artificial Sequence: Synthetic peptide
ARGPGYNWLDP

SEQ ID NO: 1713 - DNA, 321 bp, synthetic construct; identical to SEQ ID NO: 569
  misc_feature 1..321: note = Description of Artificial Sequence: Synthetic polynucleotide
  source 1..321: mol_type = other DNA

SEQ ID NO: 1714 - protein, 107 aa, synthetic construct; identical to SEQ ID NO: 570
  REGION 1..107: note = Description of Artificial Sequence: Synthetic polypeptide

SEQ ID NO: 1715 - DNA, 18 bp, synthetic construct
  misc_feature 1..18: note = Description of Artificial Sequence: Synthetic oligonucleotide
  source 1..18: mol_type = other DNA
cagagaattagcagcaac

SEQ ID NO: 1716 - protein, 6 aa, synthetic construct
  REGION 1..6: note = Description of Artificial Sequence: Synthetic peptide
QRISSN

SEQ ID NO: 1717-1718 - skipped (2 entries)

SEQ ID NO: 1719 - DNA, 27 bp, synthetic construct
  misc_feature 1..27: note = Description of Artificial Sequence: Synthetic oligonucleotide
  source 1..27: mol_type = other DNA
cagcaacatcataactggcctctcact

SEQ ID NO: 1720 - protein, 9 aa, synthetic construct
  REGION 1..9: note = Description of Artificial Sequence: Synthetic peptide
QQHHNWPLT

SEQ ID NO: 1721 - protein, 119 aa, synthetic construct
  REGION 1..119: note = Description of Artificial Sequence: Synthetic polypeptide
DVQLVQSGAEVKKPGASVKVSCKASGYTFTRYTMHWVRQAPGQGLEWIGYINPSRGYTNYADSVKGRFTITTDKSTSTAYMELSSLRSEDTATYYCARYYDDHYCLDYWGQGTTVTVSS

SEQ ID NO: 1722 - protein, 8 aa, synthetic construct
  REGION 1..8: note = Description of Artificial Sequence: Synthetic peptide
GYTFTRYT

SEQ ID NO: 1723 - protein, 8 aa, synthetic construct
  REGION 1..8: note = Description of Artificial Sequence: Synthetic peptide
INPSRGYT

SEQ ID NO: 1724 - protein, 12 aa, synthetic construct
  REGION 1..12: note = Description of Artificial Sequence: Synthetic peptide
ARYYDDHYCLDY

SEQ ID NO: 1725 - protein, 106 aa, synthetic construct
  REGION 1..106: note = Description of Artificial Sequence: Synthetic polypeptide
DIVLTQSPATLSLSPGERATLSCRASQSVSYMNWYQQKPGKAPKRWIYDTSKVASGVPARFSGSGSGTDYSLTINSLEAEDAATYYCQQWSSNPLTFGGGTKVEIK

SEQ ID NO: 1726 - protein, 11 aa, synthetic construct
  REGION 1..11: note = Description of Artificial Sequence: Synthetic peptide
LSCRASQSVSY

SEQ ID NO: 1727 - skipped

SEQ ID NO: 1728 - protein, 9 aa, synthetic construct
  REGION 1..9: note = Description of Artificial Sequence: Synthetic peptide
QQWSSNPLT

SEQ ID NO: 1729 - DNA, 372 bp, synthetic construct; identical to SEQ ID NO: 1609
  misc_feature 1..372: note = Description of Artificial Sequence: Synthetic polynucleotide
  source 1..372: mol_type = other DNA

SEQ ID NO: 1730 - protein, 124 aa, synthetic construct; identical to SEQ ID NO: 1610
  REGION 1..124: note = Description of Artificial Sequence: Synthetic polypeptide

SEQ ID NO: 1731 - DNA, 24 bp, synthetic construct
  misc_feature 1..24: note = Description of Artificial Sequence: Synthetic oligonucleotide
  source 1..24: mol_type = other DNA
gggtttacattcgacgattacagc

SEQ ID NO: 1732 - protein, 8 aa, synthetic construct
  REGION 1..8: note = Description of Artificial Sequence: Synthetic peptide
GFTFDDYS

SEQ ID NO: 1733 - DNA, 24 bp, synthetic construct
  misc_feature 1..24: note = Description of Artificial Sequence: Synthetic oligonucleotide
  source 1..24: mol_type = other DNA
atatcatggaactcaggaagcaag

SEQ ID NO: 1734 - protein, 8 aa, synthetic construct
  REGION 1..8: note = Description of Artificial Sequence: Synthetic peptide
ISWNSGSK

SEQ ID NO: 1735 - DNA, 51 bp, synthetic construct; identical to SEQ ID NO: 1615
  misc_feature 1..51: note = Description of Artificial Sequence: Synthetic oligonucleotide
  source 1..51: mol_type = other DNA

SEQ ID NO: 1736 - protein, 17 aa, synthetic construct
  REGION 1..17: note = Description of Artificial Sequence: Synthetic peptide
AKYGSGYGKFYHYGLDV

SEQ ID NO: 1737 - DNA, 372 bp, synthetic construct
  misc_feature 1..372: note = Description of Artificial Sequence: Synthetic polynucleotide
  source 1..372: mol_type = other DNA
gaagtacagttggtagaatctggaggaggactcgtgcaaccaggacgatcattgcggttgagttgtgctgctagtggattcacattcgacgactatgctatgcattgggtaagacaggctccaggaaaaggactcgaatgggtgtcaggaataagttggaactccggaagcattgggtacgcagattcagtcaaagggcgattcaccatatcccgagataacgctaagaactcactttaccttcaaatgaactctcttcgagcagaggacactgcactttattattgcgctaaggacggctccggttatggatatttttattattatggaatggacgtatggggacaaggcactactgttaccgttagttcc

SEQ ID NO: 1738 - protein, 124 aa, synthetic construct
  REGION 1..124: note = Description of Artificial Sequence: Synthetic polypeptide
EVQLVESGGGLVQPGRSLRLSCAASGFTFDDYAMHWVRQAPGKGLEWVSGISWNSGSIGYADSVKGRFTISRDNAKNSLYLQMNSLRAEDTALYYCAKDGSGYGYFYYYGMDVWGQGTTVTVSS

SEQ ID NO: 1739 - DNA, 24 bp, synthetic construct
  misc_feature 1..24: note = Description of Artificial Sequence: Synthetic oligonucleotide
  source 1..24: mol_type = other DNA
ggattcacattcgacgactatgct

SEQ ID NO: 1740 - protein, 8 aa, synthetic construct
  REGION 1..8: note = Description of Artificial Sequence: Synthetic peptide
GFTFDDYA

SEQ ID NO: 1741 - DNA, 24 bp, synthetic construct
  misc_feature 1..24: note = Description of Artificial Sequence: Synthetic oligonucleotide
  source 1..24: mol_type = other DNA
ataagttggaactccggaagcatt

SEQ ID NO: 1742 - protein, 8 aa, synthetic construct
  REGION 1..8: note = Description of Artificial Sequence: Synthetic peptide
ISWNSGSI

SEQ ID NO: 1743 - DNA, 51 bp, synthetic construct
  misc_feature 1..51: note = Description of Artificial Sequence: Synthetic oligonucleotide
  source 1..51: mol_type = other DNA
gctaaggacggctccggttatggatatttttattattatggaatggacgta

SEQ ID NO: 1744 - protein, 17 aa, synthetic construct
  REGION 1..17: note = Description of Artificial Sequence: Synthetic peptide
AKDGSGYGYFYYYGMDV

SEQ ID NO: 1745 - DNA, 372 bp, synthetic construct; identical to SEQ ID NO: 1617
  misc_feature 1..372: note = Description of Artificial Sequence: Synthetic polynucleotide
  source 1..372: mol_type = other DNA

SEQ ID NO: 1746 - protein, 124 aa, synthetic construct; identical to SEQ ID NO: 1618
  REGION 1..124: note = Description of Artificial Sequence: Synthetic polypeptide

SEQ ID NO: 1747 - DNA, 24 bp, synthetic construct
  misc_feature 1..24: note = Description of Artificial Sequence: Synthetic oligonucleotide
  source 1..24: mol_type = other DNA
ggtttcactttcgacgattatagc

SEQ ID NO: 1748 - protein, 8 aa, synthetic construct
  REGION 1..8: note = Description of Artificial Sequence: Synthetic peptide
GFTFDDYS

SEQ ID NO: 1749 - DNA, 24 bp, synthetic construct
  misc_feature 1..24: note = Description of Artificial Sequence: Synthetic oligonucleotide
  source 1..24: mol_type = other DNA
attagttggaactcaggaagtatt

SEQ ID NO: 1750 - protein, 8 aa, synthetic construct
  REGION 1..8: note = Description of Artificial Sequence: Synthetic peptide
ISWNSGSI

SEQ ID NO: 1751 - DNA, 51 bp, synthetic construct; identical to SEQ ID NO: 1623
  misc_feature 1..51: note = Description of Artificial Sequence: Synthetic oligonucleotide
  source 1..51: mol_type = other DNA

SEQ ID NO: 1752 - protein, 17 aa, synthetic construct
  REGION 1..17: note = Description of Artificial Sequence: Synthetic peptide
AKDGSGYGYFYYYGMDV

SEQ ID NO: 1753 - DNA, 372 bp, synthetic construct
  misc_feature 1..372: note = Description of Artificial Sequence: Synthetic polynucleotide
  source 1..372: mol_type = other DNA
gaagttcaacttgtggaaagtggcggaggattggttcaaccaggacgttcattgaggctttcatgcgcagcttccggatttacatttgacgattacgcaatgcactgggttagacaggcaccaggaaaaggactggagtgggtgagcgggatttcatggaacagcggcagtatcggttatgcagactcagttaaaggaagattcaccatcagtagagacaacgcaaaaaattccctttatctccaaatgaactctcttagggccgaagatacagcattgtactactgcgcaaaagacggatcaggttacggaaaattttactactatggtatggatgtatggggtcagggaaccacagtaactgtatcaagc

SEQ ID NO: 1754 - protein, 124 aa, synthetic construct
  REGION 1..124: note = Description of Artificial Sequence: Synthetic polypeptide
EVQLVESGGGLVQPGRSLRLSCAASGFTFDDYAMHWVRQAPGKGLEWVSGISWNSGSIGYADSVKGRFTISRDNAKNSLYLQMNSLRAEDTALYYCAKDGSGYGKFYYYGMDVWGQGTTVTVSS

SEQ ID NO: 1755 - DNA, 24 bp, synthetic construct
  misc_feature 1..24: note = Description of Artificial Sequence: Synthetic oligonucleotide
  source 1..24: mol_type = other DNA
ggatttacatttgacgattacgca

SEQ ID NO: 1756 - protein, 8 aa, synthetic construct
  REGION 1..8: note = Description of Artificial Sequence: Synthetic peptide
GFTFDDYA

SEQ ID NO: 1757 - DNA, 24 bp, synthetic construct
  misc_feature 1..24: note = Description of Artificial Sequence: Synthetic oligonucleotide
  source 1..24: mol_type = other DNA
atttcatggaacagcggcagtatc

SEQ ID NO: 1758 - protein, 8 aa, synthetic construct
  REGION 1..8: note = Description of Artificial Sequence: Synthetic peptide
ISWNSGSI

SEQ ID NO: 1759 - DNA, 51 bp, synthetic construct
  misc_feature 1..51: note = Description of Artificial Sequence: Synthetic oligonucleotide
  source 1..51: mol_type = other DNA
gcaaaagacggatcaggttacggaaaattttactactatggtatggatgta

SEQ ID NO: 1760 - protein, 17 aa, synthetic construct
  REGION 1..17: note = Description of Artificial Sequence: Synthetic peptide
AKDGSGYGKFYYYGMDV

SEQ ID NO: 1761 - DNA, 372 bp, synthetic construct; identical to SEQ ID NO: 1625
  misc_feature 1..372: note = Description of Artificial Sequence: Synthetic polynucleotide
  source 1..372: mol_type = other DNA

SEQ ID NO: 1762 - protein, 124 aa, synthetic construct; identical to SEQ ID NO: 1626
  REGION 1..124: note = Description of Artificial Sequence: Synthetic polypeptide

SEQ ID NO: 1763 - DNA, 24 bp, synthetic construct
  misc_feature 1..24: note = Description of Artificial Sequence: Synthetic oligonucleotide
  source 1..24: mol_type = other DNA
ggatttacatttgacgactattca

SEQ ID NO: 1764 - protein, 8 aa, synthetic construct
  REGION 1..8: note = Description of Artificial Sequence: Synthetic peptide
GFTFDDYS

SEQ ID NO: 1765 - DNA, 24 bp, synthetic construct
  misc_feature 1..24: note = Description of Artificial Sequence: Synthetic oligonucleotide
  source 1..24: mol_type = other DNA
atatcttggaactcaggcagtatt

SEQ ID NO: 1766 - protein, 8 aa, synthetic construct
  REGION 1..8: note = Description of Artificial Sequence: Synthetic peptide
ISWNSGSI

SEQ ID NO: 1767 - DNA, 51 bp, synthetic construct; identical to SEQ ID NO: 1631
  misc_feature 1..51: note = Description of Artificial Sequence: Synthetic oligonucleotide
  source 1..51: mol_type = other DNA

SEQ ID NO: 1768 - protein, 17 aa, synthetic construct
  REGION 1..17: note = Description of Artificial Sequence: Synthetic peptide
AKDGSGYGKFYYYGMDV

SEQ ID NO: 1769 - DNA, 372 bp, synthetic construct
  misc_feature 1..372: note = Description of Artificial Sequence: Synthetic polynucleotide
  source 1..372: mol_type = other DNA
gaagtacagcttgtagaatccggcggaggactggtacaacctggaagaagtcttagactgagttgcgcagctagtgggtttacattcgacgattacagcatgcattgggtgaggcaagctcctggtaaaggattggaatgggttagcgggatatcatggaactcaggaagcatcggatacgccgacagcgtgaaaggccgatttacaatatctagggacaacgcaaaaaactctctctaccttcaaatgaactctcttagggcagaagacacagcattgtattattgcgcaaaatacggcagtggttatggcaagttttatcattatggactggacgtgtggggacaagggacaacagtgacagtgagtagc

SEQ ID NO: 1770 - protein, 124 aa, synthetic construct
  REGION 1..124: note = Description of Artificial Sequence: Synthetic polypeptide
EVQLVESGGGLVQPGRSLRLSCAASGFTFDDYSMHWVRQAPGKGLEWVSGISWNSGSIGYADSVKGRFTISRDNAKNSLYLQMNSLRAEDTALYYCAKYGSGYGKFYHYGLDVWGQGTTVTVSS

SEQ ID NO: 1771 - DNA, 24 bp, synthetic construct
  misc_feature 1..24: note = Description of Artificial Sequence: Synthetic oligonucleotide
  source 1..24: mol_type = other DNA
gggtttacattcgacgattacagc

SEQ ID NO: 1772 - protein, 8 aa, synthetic construct
  REGION 1..8: note = Description of Artificial Sequence: Synthetic peptide
GFTFDDYS

SEQ ID NO: 1773 - DNA, 24 bp, synthetic construct
  misc_feature 1..24: note = Description of Artificial Sequence: Synthetic oligonucleotide
  source 1..24: mol_type = other DNA
atatcatggaactcaggaagcatc

SEQ ID NO: 1774 - protein, 8 aa, synthetic construct
  REGION 1..8: note = Description of Artificial Sequence: Synthetic peptide
ISWNSGSI

SEQ ID NO: 1775 - DNA, 51 bp, synthetic construct; identical to SEQ ID NO: 1615
  misc_feature 1..51: note = Description of Artificial Sequence: Synthetic oligonucleotide
  source 1..51: mol_type = other DNA

SEQ ID NO: 1776 - protein, 17 aa, synthetic construct
  REGION 1..17: note = Description of Artificial Sequence: Synthetic peptide
AKYGSGYGKFYHYGLDV

SEQ ID NO: 1777 - DNA, 372 bp, synthetic construct
  misc_feature 1..372: note = Description of Artificial Sequence: Synthetic polynucleotide
  source 1..372: mol_type = other DNA
gaagtacagcttgtagaatccggcggaggactggtacaacctggaagaagtcttagactgagttgcgcagctagtgggtttacattcgacgattacagcatgcattgggtgaggcaagctcctggtaaaggattggaatgggttagcgggatatcatggaactcaggaagcaagggatacgccgacagcgtgaaaggccgatttacaatatctagggacaacgcaaaaaactctctctaccttcaaatgaactctcttagggcagaagacacagcattgtattattgcgcaaaagacggcagtggttatggcaagttttatcattatggactggacgtgtggggacaagggacaacagtgacagtgagtagc

SEQ ID NO: 1778 - protein, 124 aa, synthetic construct
  REGION 1..124: note = Description of Artificial Sequence: Synthetic polypeptide
EVQLVESGGGLVQPGRSLRLSCAASGFTFDDYSMHWVRQAPGKGLEWVSGISWNSGSKGYADSVKGRFTISRDNAKNSLYLQMNSLRAEDTALYYCAKDGSGYGKFYHYGLDVWGQGTTVTVSS

SEQ ID NO: 1779 - DNA, 24 bp, synthetic construct
  misc_feature 1..24: note = Description of Artificial Sequence: Synthetic oligonucleotide
  source 1..24: mol_type = other DNA
gggtttacattcgacgattacagc

SEQ ID NO: 1780 - protein, 8 aa, synthetic construct
  REGION 1..8: note = Description of Artificial Sequence: Synthetic peptide
GFTFDDYS

SEQ ID NO: 1781 - DNA, 24 bp, synthetic construct
  misc_feature 1..24: note = Description of Artificial Sequence: Synthetic oligonucleotide
  source 1..24: mol_type = other DNA
atatcatggaactcaggaagcaag

SEQ ID NO: 1782 - protein, 8 aa, synthetic construct
  REGION 1..8: note = Description of Artificial Sequence: Synthetic peptide
ISWNSGSK

SEQ ID NO: 1783 - DNA, 51 bp, synthetic construct
  misc_feature 1..51: note = Description of Artificial Sequence: Synthetic oligonucleotide
  source 1..51: mol_type = other DNA
gcaaaagacggcagtggttatggcaagttttatcattatggactggacgtg

SEQ ID NO: 1784 - protein, 17 aa, synthetic construct
  REGION 1..17: note = Description of Artificial Sequence: Synthetic peptide
AKDGSGYGKFYHYGLDV

SEQ ID NO: 1785 - DNA, 372 bp, synthetic construct
  misc_feature 1..372: note = Description of Artificial Sequence: Synthetic polynucleotide
  source 1..372: mol_type = other DNA
gaagtacagcttgtagaatccggcggaggactggtacaacctggaagaagtcttagactgagttgcgcagctagtgggtttacattcgacgattacagcatgcattgggtgaggcaagctcctggtaaaggattggaatgggttagcgggatatcatggaactcaggaagcaagggatacgccgacagcgtgaaaggccgatttacaatatctagggacaacgcaaaaaactctctctaccttcaaatgaactctcttagggcagaagacacagcattgtattattgcgcaaaatacggcagtggttatggcaagttttattattatggactggacgtgtggggacaagggacaacagtgacagtgagtagc

SEQ ID NO: 1786 - protein, 124 aa, synthetic construct
  REGION 1..124: note = Description of Artificial Sequence: Synthetic polypeptide
EVQLVESGGGLVQPGRSLRLSCAASGFTFDDYSMHWVRQAPGKGLEWVSGISWNSGSKGYADSVKGRFTISRDNAKNSLYLQMNSLRAEDTALYYCAKYGSGYGKFYYYGLDVWGQGTTVTVSS

SEQ ID NO: 1787 - DNA, 24 bp, synthetic construct
  misc_feature 1..24: note = Description of Artificial Sequence: Synthetic oligonucleotide
  source 1..24: mol_type = other DNA
gggtttacattcgacgattacagc

SEQ ID NO: 1788 - protein, 8 aa, synthetic construct
  REGION 1..8: note = Description of Artificial Sequence: Synthetic peptide
GFTFDDYS

SEQ ID NO: 1789 - DNA, 24 bp, synthetic construct
  misc_feature 1..24: note = Description of Artificial Sequence: Synthetic oligonucleotide
  source 1..24: mol_type = other DNA
atatcatggaactcaggaagcaag

SEQ ID NO: 1790 - protein, 8 aa, synthetic construct
  REGION 1..8: note = Description of Artificial Sequence: Synthetic peptide
ISWNSGSK

SEQ ID NO: 1791 - DNA, 51 bp, synthetic construct
  misc_feature 1..51: note = Description of Artificial Sequence: Synthetic oligonucleotide
  source 1..51: mol_type = other DNA
gcaaaatacggcagtggttatggcaagttttattattatggactggacgtg

SEQ ID NO: 1792 - protein, 17 aa, synthetic construct
  REGION 1..17: note = Description of Artificial Sequence: Synthetic peptide
AKYGSGYGKFYYYGLDV

SEQ ID NO: 1793 - DNA, 372 bp, synthetic construct
  misc_feature 1..372: note = Description of Artificial Sequence: Synthetic polynucleotide
  source 1..372: mol_type = other DNA
gaagtacagcttgtagaatccggcggaggactggtacaacctggaagaagtcttagactgagttgcgcagctagtgggtttacattcgacgattacagcatgcattgggtgaggcaagctcctggtaaaggattggaatgggttagcgggatatcatggaactcaggaagcaagggatacgccgacagcgtgaaaggccgatttacaatatctagggacaacgcaaaaaactctctctaccttcaaatgaactctcttagggcagaagacacagcattgtattattgcgcaaaatacggcagtggttatggcaagttttatcattatggaatggacgtgtggggacaagggacaacagtgacagtgagtagc

SEQ ID NO: 1794 - protein, 124 aa, synthetic construct
  REGION 1..124: note = Description of Artificial Sequence: Synthetic polypeptide
EVQLVESGGGLVQPGRSLRLSCAASGFTFDDYSMHWVRQAPGKGLEWVSGISWNSGSKGYADSVKGRFTISRDNAKNSLYLQMNSLRAEDTALYYCAKYGSGYGKFYHYGMDVWGQGTTVTVSS

SEQ ID NO: 1795 - DNA, 24 bp, synthetic construct
  misc_feature 1..24: note = Description of Artificial Sequence: Synthetic oligonucleotide
  source 1..24: mol_type = other DNA
gggtttacattcgacgattacagc

SEQ ID NO: 1796 - protein, 8 aa, synthetic construct
  REGION 1..8: note = Description of Artificial Sequence: Synthetic peptide
GFTFDDYS

SEQ ID NO: 1797 - DNA, 24 bp, synthetic construct
  misc_feature 1..24: note = Description of Artificial Sequence: Synthetic oligonucleotide
  source 1..24: mol_type = other DNA
atatcatggaactcaggaagcaag

SEQ ID NO: 1798 - protein, 8 aa, synthetic construct
  REGION 1..8: note = Description of Artificial Sequence: Synthetic peptide
ISWNSGSK

SEQ ID NO: 1799 - DNA, 51 bp, synthetic construct
  misc_feature 1..51: note = Description of Artificial Sequence: Synthetic oligonucleotide
  source 1..51: mol_type = other DNA
gcaaaatacggcagtggttatggcaagttttatcattatggaatggacgtg

SEQ ID NO: 1800 - protein, 17 aa, synthetic construct
  REGION 1..17: note = Description of Artificial Sequence: Synthetic peptide
AKYGSGYGKFYHYGMDV

SEQ ID NO: 1801 - DNA, 372 bp, synthetic construct
  misc_feature 1..372: note = Description of Artificial Sequence: Synthetic polynucleotide
  source 1..372: mol_type = other DNA
gaagtacagcttgtagaatccggcggaggactggtacaacctggaagaagtcttagactgagttgcgcagctagtgggtttacattcgacgattacagcatgcattgggtgaggcaagctcctggtaaaggattggaatgggttagcgggatatcatggaactcaggaagcatcggatacgccgacagcgtgaaaggccgatttacaatatctagggacaacgcaaaaaactctctctaccttcaaatgaactctcttagggcagaagacacagcattgtattattgcgcaaaagacggcagtggttatggcaagttttatcattatggactggacgtgtggggacaagggacaacagtgacagtgagtagc

SEQ ID NO: 1802 - protein, 124 aa, synthetic construct
  REGION 1..124: note = Description of Artificial Sequence: Synthetic polypeptide
EVQLVESGGGLVQPGRSLRLSCAASGFTFDDYSMHWVRQAPGKGLEWVSGISWNSGSIGYADSVKGRFTISRDNAKNSLYLQMNSLRAEDTALYYCAKDGSGYGKFYHYGLDVWGQGTTVTVSS

SEQ ID NO: 1803 - DNA, 24 bp, synthetic construct
  misc_feature 1..24: note = Description of Artificial Sequence: Synthetic oligonucleotide
  source 1..24: mol_type = other DNA
gggtttacattcgacgattacagc

SEQ ID NO: 1804 - protein, 8 aa, synthetic construct
  REGION 1..8: note = Description of Artificial Sequence: Synthetic peptide
GFTFDDYS

SEQ ID NO: 1805 - DNA, 24 bp, synthetic construct
  misc_feature 1..24: note = Description of Artificial Sequence: Synthetic oligonucleotide
  source 1..24: mol_type = other DNA
atatcatggaactcaggaagcatc

SEQ ID NO: 1806 - protein, 8 aa, synthetic construct
  REGION 1..8: note = Description of Artificial Sequence: Synthetic peptide
ISWNSGSI

SEQ ID NO: 1807 - DNA, 51 bp, synthetic construct; identical to SEQ ID NO: 1783
  misc_feature 1..51: note = Description of Artificial Sequence: Synthetic oligonucleotide
  source 1..51: mol_type = other DNA

SEQ ID NO: 1808 - protein, 17 aa, synthetic construct
  REGION 1..17: note = Description of Artificial Sequence: Synthetic peptide
AKDGSGYGKFYHYGLDV

SEQ ID NO: 1809 - DNA, 372 bp, synthetic construct
  misc_feature 1..372: note = Description of Artificial Sequence: Synthetic polynucleotide
  source 1..372: mol_type = other DNA
gaagtacagcttgtagaatccggcggaggactggtacaacctggaagaagtcttagactgagttgcgcagctagtgggtttacattcgacgattacagcatgcattgggtgaggcaagctcctggtaaaggattggaatgggttagcgggatatcatggaactcaggaagcatcggatacgccgacagcgtgaaaggccgatttacaatatctagggacaacgcaaaaaactctctctaccttcaaatgaactctcttagggcagaagacacagcattgtattattgcgcaaaatacggcagtggttatggcaagttttattattatggactggacgtgtggggacaagggacaacagtgacagtgagtagc

SEQ ID NO: 1810 - protein, 124 aa, synthetic construct
  REGION 1..124: note = Description of Artificial Sequence: Synthetic polypeptide
EVQLVESGGGLVQPGRSLRLSCAASGFTFDDYSMHWVRQAPGKGLEWVSGISWNSGSIGYADSVKGRFTISRDNAKNSLYLQMNSLRAEDTALYYCAKYGSGYGKFYYYGLDVWGQGTTVTVSS

SEQ ID NO: 1811 - DNA, 24 bp, synthetic construct
  misc_feature 1..24: note = Description of Artificial Sequence: Synthetic oligonucleotide
  source 1..24: mol_type = other DNA
gggtttacattcgacgattacagc

SEQ ID NO: 1812 - protein, 8 aa, synthetic construct
  REGION 1..8: note = Description of Artificial Sequence: Synthetic peptide
GFTFDDYS

SEQ ID NO: 1813 - DNA, 24 bp, synthetic construct
  misc_feature 1..24: note = Description of Artificial Sequence: Synthetic oligonucleotide
  source 1..24: mol_type = other DNA
atatcatggaactcaggaagcatc

SEQ ID NO: 1814 - protein, 8 aa, synthetic construct
  REGION 1..8: note = Description of Artificial Sequence: Synthetic peptide
ISWNSGSI

SEQ ID NO: 1815 - DNA, 51 bp, synthetic construct; identical to SEQ ID NO: 1791
  misc_feature 1..51: note = Description of Artificial Sequence: Synthetic oligonucleotide
  source 1..51: mol_type = other DNA

SEQ ID NO: 1816 - protein, 17 aa, synthetic construct
  REGION 1..17: note = Description of Artificial Sequence: Synthetic peptide
AKYGSGYGKFYYYGLDV

SEQ ID NO: 1817 - DNA, 372 bp, synthetic construct
  misc_feature 1..372: note = Description of Artificial Sequence: Synthetic polynucleotide
  source 1..372: mol_type = other DNA
gaagtacagcttgtagaatccggcggaggactggtacaacctggaagaagtcttagactgagttgcgcagctagtgggtttacattcgacgattacagcatgcattgggtgaggcaagctcctggtaaaggattggaatgggttagcgggatatcatggaactcaggaagcatcggatacgccgacagcgtgaaaggccgatttacaatatctagggacaacgcaaaaaactctctctaccttcaaatgaactctcttagggcagaagacacagcattgtattattgcgcaaaatacggcagtggttatggcaagttttatcattatggaatggacgtgtggggacaagggacaacagtgacagtgagtagc

SEQ ID NO: 1818 - protein, 124 aa, synthetic construct
  REGION 1..124: note = Description of Artificial Sequence: Synthetic polypeptide
EVQLVESGGGLVQPGRSLRLSCAASGFTFDDYSMHWVRQAPGKGLEWVSGISWNSGSIGYADSVKGRFTISRDNAKNSLYLQMNSLRAEDTALYYCAKYGSGYGKFYHYGMDVWGQGTTVTVSS

SEQ ID NO: 1819 - DNA, 24 bp, synthetic construct
  misc_feature 1..24: note = Description of Artificial Sequence: Synthetic oligonucleotide
  source 1..24: mol_type = other DNA
gggtttacattcgacgattacagc

SEQ ID NO: 1820 - protein, 8 aa, synthetic construct
  REGION 1..8: note = Description of Artificial Sequence: Synthetic peptide
GFTFDDYS

SEQ ID NO: 1821 - DNA, 24 bp, synthetic construct
  misc_feature 1..24: note = Description of Artificial Sequence: Synthetic oligonucleotide
  source 1..24: mol_type = other DNA
atatcatggaactcaggaagcatc

SEQ ID NO: 1822 - protein, 8 aa, synthetic construct
  REGION 1..8: note = Description of Artificial Sequence: Synthetic peptide
ISWNSGSI

SEQ ID NO: 1823 - DNA, 51 bp, synthetic construct; identical to SEQ ID NO: 1799
  misc_feature 1..51: note = Description of Artificial Sequence: Synthetic oligonucleotide
  source 1..51: mol_type = other DNA

SEQ ID NO: 1824 - protein, 17 aa, synthetic construct
  REGION 1..17: note = Description of Artificial Sequence: Synthetic peptide
AKYGSGYGKFYHYGMDV

SEQ ID NO: 1825 - DNA, 372 bp, synthetic construct
  misc_feature 1..372: note = Description of Artificial Sequence: Synthetic polynucleotide
  source 1..372: mol_type = other DNA
gaagtacagcttgtagaatccggcggaggactggtacaacctggaagaagtcttagactgagttgcgcagctagtgggtttacattcgacgattacagcatgcattgggtgaggcaagctcctggtaaaggattggaatgggttagcgggatatcatggaactcaggaagcaagggatacgccgacagcgtgaaaggccgatttacaatatctagggacaacgcaaaaaactctctctaccttcaaatgaactctcttagggcagaagacacagcattgtattattgcgcaaaagacggcagtggttatggcaagttttattattatggactggacgtgtggggacaagggacaacagtgacagtgagtagc

SEQ ID NO: 1826 - protein, 124 aa, synthetic construct
  REGION 1..124: note = Description of Artificial Sequence: Synthetic polypeptide
EVQLVESGGGLVQPGRSLRLSCAASGFTFDDYSMHWVRQAPGKGLEWVSGISWNSGSKGYADSVKGRFTISRDNAKNSLYLQMNSLRAEDTALYYCAKDGSGYGKFYYYGLDVWGQGTTVTVSS

SEQ ID NO: 1827 - DNA, 24 bp, synthetic construct
  misc_feature 1..24: note = Description of Artificial Sequence: Synthetic oligonucleotide
  source 1..24: mol_type = other DNA
gggtttacattcgacgattacagc

SEQ ID NO: 1828 - protein, 8 aa, synthetic construct
  REGION 1..8: note = Description of Artificial Sequence: Synthetic peptide
GFTFDDYS

SEQ ID NO: 1829 - DNA, 24 bp, synthetic construct
  misc_feature 1..24: note = Description of Artificial Sequence: Synthetic oligonucleotide
  source 1..24: mol_type = other DNA
atatcatggaactcaggaagcaag

SEQ ID NO: 1830 - protein, 8 aa, synthetic construct
  REGION 1..8: note = Description of Artificial Sequence: Synthetic peptide
ISWNSGSK

SEQ ID NO: 1831 - DNA, 51 bp, synthetic construct
  misc_feature 1..51: note = Description of Artificial Sequence: Synthetic oligonucleotide
  source 1..51: mol_type = other DNA
gcaaaagacggcagtggttatggcaagttttattattatggactggacgtg

SEQ ID NO: 1832 - protein, 17 aa, synthetic construct
  REGION 1..17: note = Description of Artificial Sequence: Synthetic peptide
AKDGSGYGKFYYYGLDV

SEQ ID NO: 1833 - DNA, 372 bp, synthetic construct
  misc_feature 1..372: note = Description of Artificial Sequence: Synthetic polynucleotide
  source 1..372: mol_type = other DNA
gaagtacagcttgtagaatccggcggaggactggtacaacctggaagaagtcttagactgagttgcgcagctagtgggtttacattcgacgattacagcatgcattgggtgaggcaagctcctggtaaaggattggaatgggttagcgggatatcatggaactcaggaagcaagggatacgccgacagcgtgaaaggccgatttacaatatctagggacaacgcaaaaaactctctctaccttcaaatgaactctcttagggcagaagacacagcattgtattattgcgcaaaagacggcagtggttatggcaagttttatcattatggaatggacgtgtggggacaagggacaacagtgacagtgagtagc

SEQ ID NO: 1834 - protein, 124 aa, synthetic construct
  REGION 1..124: note = Description of Artificial Sequence: Synthetic polypeptide
EVQLVESGGGLVQPGRSLRLSCAASGFTFDDYSMHWVRQAPGKGLEWVSGISWNSGSKGYADSVKGRFTISRDNAKNSLYLQMNSLRAEDTALYYCAKDGSGYGKFYHYGMDVWGQGTTVTVSS

SEQ ID NO: 1835 - DNA, 24 bp, synthetic construct
  misc_feature 1..24: note = Description of Artificial Sequence: Synthetic oligonucleotide
  source 1..24: mol_type = other DNA
gggtttacattcgacgattacagc

SEQ ID NO: 1836 - protein, 8 aa, synthetic construct
  REGION 1..8: note = Description of Artificial Sequence: Synthetic peptide
GFTFDDYS

SEQ ID NO: 1837 - DNA, 24 bp, synthetic construct
  misc_feature 1..24: note = Description of Artificial Sequence: Synthetic oligonucleotide
  source 1..24: mol_type = other DNA
atatcatggaactcaggaagcaag

SEQ ID NO: 1838 - protein, 8 aa, synthetic construct
  REGION 1..8: note = Description of Artificial Sequence: Synthetic peptide
ISWNSGSK

SEQ ID NO: 1839 - DNA, 51 bp, synthetic construct
  misc_feature 1..51: note = Description of Artificial Sequence: Synthetic oligonucleotide
  source 1..51: mol_type = other DNA
gcaaaagacggcagtggttatggcaagttttatcattatggaatggacgtg

SEQ ID NO: 1840 - protein, 17 aa, synthetic construct
  REGION 1..17: note = Description of Artificial Sequence: Synthetic peptide
AKDGSGYGKFYHYGMDV

SEQ ID NO: 1841 - DNA, 372 bp, synthetic construct
  misc_feature 1..372: note = Description of Artificial Sequence: Synthetic polynucleotide
  source 1..372: mol_type = other DNA
gaagtacagcttgtagaatccggcggaggactggtacaacctggaagaagtcttagactgagttgcgcagctagtgggtttacattcgacgattacagcatgcattgggtgaggcaagctcctggtaaaggattggaatgggttagcgggatatcatggaactcaggaagcaagggatacgccgacagcgtgaaaggccgatttacaatatctagggacaacgcaaaaaactctctctaccttcaaatgaactctcttagggcagaagacacagcattgtattattgcgcaaaatacggcagtggttatggcaagttttattattatggaatggacgtgtggggacaagggacaacagtgacagtgagtagc

SEQ ID NO: 1842 - protein, 124 aa, synthetic construct
  REGION 1..124: note = Description of Artificial Sequence: Synthetic polypeptide
EVQLVESGGGLVQPGRSLRLSCAASGFTFDDYSMHWVRQAPGKGLEWVSGISWNSGSKGYADSVKGRFTISRDNAKNSLYLQMNSLRAEDTALYYCAKYGSGYGKFYYYGMDVWGQGTTVTVSS

SEQ ID NO: 1843 - DNA, 24 bp, synthetic construct
  misc_feature 1..24: note = Description of Artificial Sequence: Synthetic oligonucleotide
  source 1..24: mol_type = other DNA
gggtttacattcgacgattacagc

SEQ ID NO: 1844 - protein, 8 aa, synthetic construct
  REGION 1..8: note = Description of Artificial Sequence: Synthetic peptide
GFTFDDYS

SEQ ID NO: 1845 - DNA, 24 bp, synthetic construct
  misc_feature 1..24: note = Description of Artificial Sequence: Synthetic oligonucleotide
  source 1..24: mol_type = other DNA
atatcatggaactcaggaagcaag

SEQ ID NO: 1846 - protein, 8 aa, synthetic construct
  REGION 1..8: note = Description of Artificial Sequence: Synthetic peptide
ISWNSGSK

SEQ ID NO: 1847 - DNA, 51 bp, synthetic construct
  misc_feature 1..51: note = Description of Artificial Sequence: Synthetic oligonucleotide
  source 1..51: mol_type = other DNA
gcaaaatacggcagtggttatggcaagttttattattatggaatggacgtg

SEQ ID NO: 1848 - protein, 17 aa, synthetic construct
  REGION 1..17: note = Description of Artificial Sequence: Synthetic peptide
AKYGSGYGKFYYYGMDV

SEQ ID NO: 1849 - DNA, 372 bp, synthetic construct
  misc_feature 1..372: note = Description of Artificial Sequence: Synthetic polynucleotide
  source 1..372: mol_type = other DNA
gaagtacagcttgtagaatccggcggaggactggtacaacctggaagaagtcttagactgagttgcgcagctagtgggtttacattcgacgattacagcatgcattgggtgaggcaagctcctggtaaaggattggaatgggttagcgggatatcatggaactcaggaagcatcggatacgccgacagcgtgaaaggccgatttacaatatctagggacaacgcaaaaaactctctctaccttcaaatgaactctcttagggcagaagacacagcattgtattattgcgcaaaagacggcagtggttatggcaagttttattattatggactggacgtgtggggacaagggacaacagtgacagtgagtagc

SEQ ID NO: 1850 - protein, 124 aa, synthetic construct
  REGION 1..124: note = Description of Artificial Sequence: Synthetic polypeptide
EVQLVESGGGLVQPGRSLRLSCAASGFTFDDYSMHWVRQAPGKGLEWVSGISWNSGSIGYADSVKGRFTISRDNAKNSLYLQMNSLRAEDTALYYCAKDGSGYGKFYYYGLDVWGQGTTVTVSS

SEQ ID NO: 1851 - DNA, 24 bp, synthetic construct
  misc_feature 1..24: note = Description of Artificial Sequence: Synthetic oligonucleotide
  source 1..24: mol_type = other DNA
gggtttacattcgacgattacagc

SEQ ID NO: 1852 - protein, 8 aa, synthetic construct
  REGION 1..8: note = Description of Artificial Sequence: Synthetic peptide
GFTFDDYS

SEQ ID NO: 1853 - DNA, 24 bp, synthetic construct
  misc_feature 1..24: note = Description of Artificial Sequence: Synthetic oligonucleotide
  source 1..24: mol_type = other DNA
atatcatggaactcaggaagcatc

SEQ ID NO: 1854 - protein, 8 aa, synthetic construct
  REGION 1..8: note = Description of Artificial Sequence: Synthetic peptide
ISWNSGSI

SEQ ID NO: 1855 - DNA, 51 bp, synthetic construct; identical to SEQ ID NO: 1831
  misc_feature 1..51: note = Description of Artificial Sequence: Synthetic oligonucleotide
  source 1..51: mol_type = other DNA

SEQ ID NO: 1856 - protein, 17 aa, synthetic construct
  REGION 1..17: note = Description of Artificial Sequence: Synthetic peptide
AKDGSGYGKFYYYGLDV

SEQ ID NO: 1857 - DNA, 372 bp, synthetic construct
  misc_feature 1..372: note = Description of Artificial Sequence: Synthetic polynucleotide
  source 1..372: mol_type = other DNA
gaagtacagcttgtagaatccggcggaggactggtacaacctggaagaagtcttagactgagttgcgcagctagtgggtttacattcgacgattacagcatgcattgggtgaggcaagctcctggtaaaggattggaatgggttagcgggatatcatggaactcaggaagcatcggatacgccgacagcgtgaaaggccgatttacaatatctagggacaacgcaaaaaactctctctaccttcaaatgaactctcttagggcagaagacacagcattgtattattgcgcaaaagacggcagtggttatggcaagttttatcattatggaatggacgtgtggggacaagggacaacagtgacagtgagtagc

SEQ ID NO: 1858 - protein, 124 aa, synthetic construct
  REGION 1..124: note = Description of Artificial Sequence: Synthetic polypeptide
EVQLVESGGGLVQPGRSLRLSCAASGFTFDDYSMHWVRQAPGKGLEWVSGISWNSGSIGYADSVKGRFTISRDNAKNSLYLQMNSLRAEDTALYYCAKDGSGYGKFYHYGMDVWGQGTTVTVSS

SEQ ID NO: 1859 - DNA, 24 bp, synthetic construct
  misc_feature 1..24: note = Description of Artificial Sequence: Synthetic oligonucleotide
  source 1..24: mol_type = other DNA
gggtttacattcgacgattacagc

SEQ ID NO: 1860 - protein, 8 aa, synthetic construct
  REGION 1..8: note = Description of Artificial Sequence: Synthetic peptide
GFTFDDYS

SEQ ID NO: 1861 - DNA, 24 bp, synthetic construct
  misc_feature 1..24: note = Description of Artificial Sequence: Synthetic oligonucleotide
  source 1..24: mol_type = other DNA
atatcatggaactcaggaagcatc

SEQ ID NO: 1862 - protein, 8 aa, synthetic construct
  REGION 1..8: note = Description of Artificial Sequence: Synthetic peptide
ISWNSGSI

SEQ ID NO: 1863 - DNA, 51 bp, synthetic construct; identical to SEQ ID NO: 1839
  misc_feature 1..51: note = Description of Artificial Sequence: Synthetic oligonucleotide
  source 1..51: mol_type = other DNA

SEQ ID NO: 1864 - protein, 17 aa, synthetic construct
  REGION 1..17: note = Description of Artificial Sequence: Synthetic peptide
AKDGSGYGKFYHYGMDV

SEQ ID NO: 1865 - DNA, 372 bp, synthetic construct
  misc_feature 1..372: note = Description of Artificial Sequence: Synthetic polynucleotide
  source 1..372: mol_type = other DNA
gaagtacagcttgtagaatccggcggaggactggtacaacctggaagaagtcttagactgagttgcgcagctagtgggtttacattcgacgattacagcatgcattgggtgaggcaagctcctggtaaaggattggaatgggttagcgggatatcatggaactcaggaagcatcggatacgccgacagcgtgaaaggccgatttacaatatctagggacaacgcaaaaaactctctctaccttcaaatgaactctcttagggcagaagacacagcattgtattattgcgcaaaatacggcagtggttatggcaagttttattattatggaatggacgtgtggggacaagggacaacagtgacagtgagtagc

SEQ ID NO: 1866 - protein, 124 aa, synthetic construct
  REGION 1..124: note = Description of Artificial Sequence: Synthetic polypeptide
EVQLVESGGGLVQPGRSLRLSCAASGFTFDDYSMHWVRQAPGKGLEWVSGISWNSGSIGYADSVKGRFTISRDNAKNSLYLQMNSLRAEDTALYYCAKYGSGYGKFYYYGMDVWGQGTTVTVSS

SEQ ID NO: 1867 - DNA, 24 bp, synthetic construct
  misc_feature 1..24: note = Description of Artificial Sequence: Synthetic oligonucleotide
  source 1..24: mol_type = other DNA
gggtttacattcgacgattacagc

SEQ ID NO: 1868 - protein, 8 aa, synthetic construct
  REGION 1..8: note = Description of Artificial Sequence: Synthetic peptide
GFTFDDYS

SEQ ID NO: 1869 - DNA, 24 bp, synthetic construct
  misc_feature 1..24: note = Description of Artificial Sequence: Synthetic oligonucleotide
  source 1..24: mol_type = other DNA
atatcatggaactcaggaagcatc

SEQ ID NO: 1870 - protein, 8 aa, synthetic construct
  REGION 1..8: note = Description of Artificial Sequence: Synthetic peptide
ISWNSGSI

SEQ ID NO: 1871 - DNA, 51 bp, synthetic construct; identical to SEQ ID NO: 1847
  misc_feature 1..51: note = Description of Artificial Sequence: Synthetic oligonucleotide
  source 1..51: mol_type = other DNA

SEQ ID NO: 1872 - protein, 17 aa, synthetic construct
  REGION 1..17: note = Description of Artificial Sequence: Synthetic peptide
AKYGSGYGKFYYYGMDV

SEQ ID NO: 1873 - DNA, 372 bp, synthetic construct
  misc_feature 1..372: note = Description of Artificial Sequence: Synthetic polynucleotide
  source 1..372: mol_type = other DNA
gaagtacagcttgtagaatccggcggaggactggtacaacctggaagaagtcttagactgagttgcgcagctagtgggtttacattcgacgattacagcatgcattgggtgaggcaagctcctggtaaaggattggaatgggttagcgggatatcatggaactcaggaagcaagggatacgccgacagcgtgaaaggccgatttacaatatctagggacaacgcaaaaaactctctctaccttcaaatgaactctcttagggcagaagacacagcattgtattattgcgcaaaagacggcagtggttatggcaagttttattattatggaatggacgtgtggggacaagggacaacagtgacagtgagtagc

SEQ ID NO: 1874 - protein, 124 aa, synthetic construct
  REGION 1..124: note = Description of Artificial Sequence: Synthetic polypeptide
EVQLVESGGGLVQPGRSLRLSCAASGFTFDDYSMHWVRQAPGKGLEWVSGISWNSGSKGYADSVKGRFTISRDNAKNSLYLQMNSLRAEDTALYYCAKDGSGYGKFYYYGMDVWGQGTTVTVSS

SEQ ID NO: 1875 - DNA, 24 bp, synthetic construct
  misc_feature 1..24: note = Description of Artificial Sequence: Synthetic oligonucleotide
  source 1..24: mol_type = other DNA
gggtttacattcgacgattacagc

SEQ ID NO: 1876 - protein, 8 aa, synthetic construct
  REGION 1..8: note = Description of Artificial Sequence: Synthetic peptide
GFTFDDYS

SEQ ID NO: 1877 - DNA, 24 bp, synthetic construct
  misc_feature 1..24: note = Description of Artificial Sequence: Synthetic oligonucleotide
  source 1..24: mol_type = other DNA
atatcatggaactcaggaagcaag

SEQ ID NO: 1878 - protein, 8 aa, synthetic construct
  REGION 1..8: note = Description of Artificial Sequence: Synthetic peptide
ISWNSGSK

SEQ ID NO: 1879 - DNA, 51 bp, synthetic construct
  misc_feature 1..51: note = Description of Artificial Sequence: Synthetic oligonucleotide
  source 1..51: mol_type = other DNA
gcaaaagacggcagtggttatggcaagttttattattatggaatggacgtg

SEQ ID NO: 1880 - protein, 17 aa, synthetic construct
  REGION 1..17: note = Description of Artificial Sequence: Synthetic peptide
AKDGSGYGKFYYYGMDV

SEQ ID NO: 1881 - DNA, 372 bp, synthetic construct
  misc_feature 1..372: note = Description of Artificial Sequence: Synthetic polynucleotide
  source 1..372: mol_type = other DNA
gaagtgcagctggtggagtctgggggaggcttggtacagcctggcaggtccctgagactctcctgtgtagcctctggattcacctttgatgattattccatgcactgggtccggcaagctccagggaagggcctggagtgggtctcaggtattagttggaatagtggtagcaaagactatgcggactctgtgaagggccgattcaccatctccagagacaacgccaagaactccctgtatctgcaaatgaacagtctgagagctgaagacacggccttgtattactgtgcaaaatatggaagtggctacgggaagttctaccactacggtttggacgtctggggccaagggaccacggtcaccgtctcctca

SEQ ID NO: 1882 - protein, 124 aa, synthetic construct; identical to SEQ ID NO: 1506
  REGION 1..124: note = Description of Artificial Sequence: Synthetic polypeptide

SEQ ID NO: 1883 - DNA, 24 bp, synthetic construct
  misc_feature 1..24: note = Description of Artificial Sequence: Synthetic oligonucleotide
  source 1..24: mol_type = other DNA
ggattcacctttgatgattattcc

SEQ ID NO: 1884 - protein, 8 aa, synthetic construct
  REGION 1..8: note = Description of Artificial Sequence: Synthetic peptide
GFTFDDYS

SEQ ID NO: 1885 - DNA, 24 bp, synthetic construct
  misc_feature 1..24: note = Description of Artificial Sequence: Synthetic oligonucleotide
  source 1..24: mol_type = other DNA
attagttggaatagtggtagcaaa

SEQ ID NO: 1886 - protein, 8 aa, synthetic construct
  REGION 1..8: note = Description of Artificial Sequence: Synthetic peptide
ISWNSGSK

SEQ ID NO: 1887 - DNA, 51 bp, synthetic construct; identical to SEQ ID NO: 1511
  misc_feature 1..51: note = Description of Artificial Sequence: Synthetic oligonucleotide
  source 1..51: mol_type = other DNA

SEQ ID NO: 1888 - protein, 17 aa, synthetic construct
  REGION 1..17: note = Description of Artificial Sequence: Synthetic peptide
AKYGSGYGKFYHYGLDV

SEQ ID NO: 1889 - DNA, 324 bp, synthetic construct
  misc_feature 1..324: note = Description of Artificial Sequence: Synthetic polynucleotide
  source 1..324: mol_type = other DNA
gacatccagatgacccagtctccatcctccctgtctgcatctgttggagacagcgtcaccatcacttgccgggcaagtcagagcattaacaactatttaaattggtatcagcagaaaccagggaaagcccctaagctcctgatctatactgcatccagtttgctaagtggggtcccttcaaggttcagtggcagtggatctgggacagatttcactctcaccatcagcggtctgcaccctgaagattttgcaacttacttctgtcaacagagtttcagtacccctccgatcaccttcggccaagggacacgactggacattaaa

SEQ ID NO: 1890 - protein, 108 aa, synthetic construct
  REGION 1..108: note = Description of Artificial Sequence: Synthetic polypeptide
DIQMTQSPSSLSASVGDSVTITCRASQSINNYLNWYQQKPGKAPKLLIYTASSLLSGVPSRFSGSGSGTDFTLTISGLHPEDFATYFCQQSFSTPPITFGQGTRLDIK

SEQ ID NO: 1891 - DNA, 18 bp, synthetic construct
  misc_feature 1..18: note = Description of Artificial Sequence: Synthetic oligonucleotide
  source 1..18: mol_type = other DNA
cagagcattaacaactat

SEQ ID NO: 1892 - protein, 6 aa, synthetic construct
  REGION 1..6: note = Description of Artificial Sequence: Synthetic peptide
QSINNY

SEQ ID NO: 1893-1894 - skipped (2 entries)

SEQ ID NO: 1895 - DNA, 30 bp, synthetic construct
  misc_feature 1..30: note = Description of Artificial Sequence: Synthetic oligonucleotide
  source 1..30: mol_type = other DNA
caacagagtttcagtacccctccgatcacc

SEQ ID NO: 1896 - protein, 10 aa, synthetic construct
  REGION 1..10: note = Description of Artificial Sequence: Synthetic peptide
QQSFSTPPIT

SEQ ID NO: 1897 - protein, 207 aa, synthetic construct
  REGION 1..207: note = Description of Artificial Sequence: Synthetic polypeptide
MQSGTHWRVLGLCLLSVGVWGQDGNEEMGGITQTPYKVSISGTTVILTCPQYPGSEILWQHNDKNIGGDEDDKNIGSDEDHLSLKEFSELEQSGYYVCYPRGSKPEDANFYLYLRARVCENCMEMDVMSVATIVIVDICITGGLLLLVYYWSKNRKAKAKPVTRGAGAGGRQRGQNKERPPPVPNPDYEPIRKGQRDLYSGLNQRRI

SEQ ID NO: 1898 - protein, 171 aa, synthetic construct
  REGION 1..171: note = Description of Artificial Sequence: Synthetic polypeptide
MEHSTFLSGLVLATLLSQVSPFKIPIEELEDRVFVNCNTSITWVEGTVGTLLSDITRLDLGKRILDPRGIYRCNGTDIYKDKESTVQVHYRMCQSCVELDPATVAGIIVTDVIATLLLALGVFCFAGHETGRLSGAADTQALLRNDQVYQPLRDRDDAQYSHLGGNWARNK

SEQ ID NO: 1899 - protein, 490 aa, Homo sapiens
MESISMMGSPKSLSETFLPNGINGIKDARKVTVGVIGSGDFAKSLTIRLIRCGYHVVIGSRNPKFASEFFPHVVDVTHHEDALTKTNIIFVAIHREHYTSLWDLRHLLVGKILIDVSNNMRINQYPESNAEYLASLFPDSLIVKGFNVVSAWALQLGPKDASRQVYICSNNIQARQQVIELARQLNFIPIDLGSLSSAREIENLPLRLFTLWRGPVVVAISLATFFFLYSFVRDVIHPYARNQQSDFYKIPIEIVNKTLPIVAITLLSLVYLAGLLAAAYQLYYGTKYRRFPPWLETWLQCRKQLGLLSFFFAMVHVAYSLCLPMRRSERYLFLNMAYQQVHANIENSWNEEEVWRIEMYISFGIMSLGLLSLLAVTSIPSVSNALNWREFSFIQSTLGYVALLISTFHVLIYGWKRAFEEEYYRFYTPPNFVLALVLPSIVILGKIILFLPCISRKLKRIKKGWEKSQFLEEGMGGTIPHVSPERVTVM

SEQ ID NO: 1900 - protein, 207 aa, synthetic construct; identical to SEQ ID NO: 1897
  REGION 1..207: note = Description of Artificial Sequence: Synthetic polypeptide

SEQ ID NO: 1901 - protein, 171 aa, synthetic construct; identical to SEQ ID NO: 1898
  REGION 1..171: note = Description of Artificial Sequence: Synthetic polypeptide

SEQ ID NO: 1902 - skipped

SEQ ID NO: 1903 - protein, 25 aa, synthetic construct [sequence omitted]

SEQ ID NO: 1904 - protein, 17 aa, synthetic construct
  REGION 1..17: note = Description of Artificial Sequence: Synthetic peptide
MHWVRQAPGKGLEWVSG

SEQ ID NO: 1905 - protein, 38 aa, synthetic construct
  REGION 1..38: note = Description of Artificial Sequence: Synthetic polypeptide
GYADSVKGRFTISRDNAKNSLYLQMNSLRAEDTALYYC

SEQ ID NO: 1906 - protein, 11 aa, synthetic construct
  REGION 1..11: note = Description of Artificial Sequence: Synthetic peptide
WGQGTTVTVSS

SEQ ID NO: 1907 - protein, 8 aa, synthetic construct
  REGION 1..8: note = Description of Artificial Sequence: Synthetic peptide
  VARIANT 8: note = MOD_RES - Any amino acid
GFTFDDYX

SEQ ID NO: 1908 - protein, 8 aa, synthetic construct
  REGION 1..8: note = Description of Artificial Sequence: Synthetic peptide
  VARIANT 8: note = MOD_RES - Any amino acid
ISWNSGSX

SEQ ID NO: 1909 - protein, 17 aa, synthetic construct
  REGION 1..17: note = Description of Artificial Sequence: Synthetic peptide
  VARIANT 3: note = MOD_RES - Any amino acid
  VARIANT 12: note = MOD_RES - Any amino acid
  VARIANT 15: note = MOD_RES - Any amino acid
AKXGSGYGKFYXYGXDV

SEQ ID NO: 1910 - protein, 125 aa, synthetic construct
  REGION 1..125: note = Description of Artificial Sequence: Synthetic polypeptide
EVQLVESGGGLVQPGRSLRLSCAASGFTFDDYAMHWVRQAPGKGLEWVSGISWNSGSIGYADSVKGRFTISRDNAKNSLYLQMNSLRAEDTALYYCAKDGYSGYGYFYYYGMDVWGQGTTVTVSS

SEQ ID NO: 1911 - protein, 330 aa, synthetic construct [sequence omitted]

SEQ ID NO: 1912 - protein, 330 aa, synthetic construct
  REGION 1..330: note = Description of Artificial Sequence: Synthetic polypeptide
ASTKGPSVFPLAPSSKSTSGGTAALGCLVKDYFPEPVTVSWNSGALTSGVHTFPAVLQSSGLYSLSSVVTVPSSSLGTQTYICNVNHKPSNTKVDKKVEPKSCDKTHTCPPCPAPELLGGPSVFLFPPKPKDTLMISRTPEVTCVVVDVSHEDPEVKFNWYVDGVEVHNAKTKPREEQYNSTYRVVSVLTVLHQDWLNGKEYKCKVSNKALPAPIEKTISKAKGQPREPQVYTLPPSRDELTKNQVSLTCLVKGFYPSDIAVEWESNGQPENNYKTTPPVLDSDGSFFLYSKLTVDKSRWQQGNVFSCSVMHEALHNRFTQKSLSLSPGK

SEQ ID NO: 1913 - protein, 326 aa, synthetic construct
  REGION 1..326: note = Description of Artificial Sequence: Synthetic polypeptide
ASTKGPSVFPLAPCSRSTSESTAALGCLVKDYFPEPVTVSWNSGALTSGVHTFPAVLQSSGLYSLSSVVTVPSSNFGTQTYTCNVDHKPSNTKVDKTVERKCCVECPPCPAPPVAGPSVFLFPPKPKDTLMISRTPEVTCVVVDVSHEDPEVQFNWYVDGVEVHNAKTKPREEQFNSTFRVVSVLTVVHQDWLNGKEYKCKVSNKGLPAPIEKTISKTKGQPREPQVYTLPPSREEMTKNQVSLTCLVKGFYPSDISVEWESNGQPENNYKTTPPMLDSDGSFFLYSKLTVDKSRWQQGNVFSCSVMHEALHNHYTQKSLSLSPGK

SEQ ID NO: 1914 - protein, 326 aa, synthetic construct
  REGION 1..326: note = Description of Artificial Sequence: Synthetic polypeptide
ASTKGPSVFPLAPCSRSTSESTAALGCLVKDYFPEPVTVSWNSGALTSGVHTFPAVLQSSGLYSLSSVVTVPSSNFGTQTYTCNVDHKPSNTKVDKTVERKCCVECPPCPAPPVAGPSVFLFPPKPKDTLMISRTPEVTCVVVDVSHEDPEVQFNWYVDGVEVHNAKTKPREEQFNSTFRVVSVLTVVHQDWLNGKEYKCKVSNKGLPAPIEKTISKTKGQPREPQVYTLPPSREEMTKNQVSLTCLVKGFYPSDISVEWESNGQPENNYKTTPPMLDSDGSFFLYSKLTVDKSRWQQGNVFSCSVMHEALHNRFTQKSLSLSPGK

SEQ ID NO: 1915 - protein, 327 aa, synthetic construct
  REGION 1..327: note = Description of Artificial Sequence: Synthetic polypeptide
ASTKGPSVFPLAPCSRSTSESTAALGCLVKDYFPEPVTVSWNSGALTSGVHTFPAVLQSSGLYSLSSVVTVPSSSLGTKTYTCNVDHKPSNTKVDKRVESKYGPPCPSCPAPEFLGGPSVFLFPPKPKDTLMISRTPEVTCVVVDVSQEDPEVQFNWYVDGVEVHNAKTKPREEQFNSTYRVVSVLTVLHQDWLNGKEYKCKVSNKGLPSSIEKTISKAKGQPREPQVYTLPPSQEEMTKNQVSLTCLVKGFYPSDIAVEWESNGQPENNYKTTPPVLDSDGSFFLYSRLTVDKSRWQEGNVFSCSVMHEALHNHYTQKSLSLSLGK

SEQ ID NO: 1916 - protein, 327 aa, synthetic construct
  REGION 1..327: note = Description of Artificial Sequence: Synthetic polypeptide
ASTKGPSVFPLAPCSRSTSESTAALGCLVKDYFPEPVTVSWNSGALTSGVHTFPAVLQSSGLYSLSSVVTVPSSSLGTKTYTCNVDHKPSNTKVDKRVESKYGPPCPSCPAPEFLGGPSVFLFPPKPKDTLMISRTPEVTCVVVDVSQEDPEVQFNWYVDGVEVHNAKTKPREEQFNSTYRVVSVLTVLHQDWLNGKEYKCKVSNKGLPSSIEKTISKAKGQPREPQVYTLPPSQEEMTKNQVSLTCLVKGFYPSDIAVEWESNGQPENNYKTTPPVLDSDGSFFLYSRLTVDKSRWQEGNVFSCSVMHEALHNRFTQKSLSLSLGK

SEQ ID NO: 1917 - protein, 329 aa, synthetic construct
  REGION 1..329: note = Description of Artificial Sequence: Synthetic polypeptide
ASTKGPSVFPLAPSSKSTSGGTAALGCLVKDYFPEPVTVSWNSGALTSGVHTFPAVLQSSGLYSLSSVVTVPSSSLGTQTYICNVNHKPSNTKVDKKVEPKSCDKTHTCPPCPAPPVAGPSVFLFPPKPKDTLMISRTPEVTCVVVDVSQEDPEVQFNWYVDGVEVHNAKTKPREEQFNSTYRVVSVLTVLHQDWLNGKEYKCKVSNKGLPSSIEKTISKAKGQPREPQVYTLPPSRDELTKNQVSLTCLVKGFYPSDIAVEWESNGQPENNYKTTPPVLDSDGSFFLYSKLTVDKSRWQQGNVFSCSVMHEALHNHYTQKSLSLSPGK

SEQ ID NO: 1918 - protein, 329 aa, synthetic construct
  REGION 1..329: note = Description of Artificial Sequence: Synthetic polypeptide
ASTKGPSVFPLAPSSKSTSGGTAALGCLVKDYFPEPVTVSWNSGALTSGVHTFPAVLQSSGLYSLSSVVTVPSSSLGTQTYICNVNHKPSNTKVDKKVEPKSCDKTHTCPPCPAPPVAGPSVFLFPPKPKDTLMISRTPEVTCVVVDVSQEDPEVQFNWYVDGVEVHNAKTKPREEQFNSTYRVVSVLTVLHQDWLNGKEYKCKVSNKGLPSSIEKTISKAKGQPREPQVYTLPPSRDELTKNQVSLTCLVKGFYPSDIAVEWESNGQPENNYKTTPPVLDSDGSFFLYSKLTVDKSRWQQGNVFSCSVMHEALHNRFTQKSLSLSPGK

SEQ ID NO: 1919 - protein, 326 aa, synthetic construct
  REGION 1..326: note = Description of Artificial Sequence: Synthetic polypeptide
ASTKGPSVFPLAPCSRSTSESTAALGCLVKDYFPEPVTVSWNSGALTSGVHTFPAVLQSSGLYSLSSVVTVPSSSLGTKTYTCNVDHKPSNTKVDKRVESKYGPPCPPCPAPPVAGPSVFLFPPKPKDTLMISRTPEVTCVVVDVSQEDPEVQFNWYVDGVEVHNAKTKPREEQFNSTYRVVSVLTVLHQDWLNGKEYKCKVSNKGLPSSIEKTISKAKGQPREPQVYTLPPSQEEMTKNQVSLTCLVKGFYPSDIAVEWESNGQPENNYKTTPPVLDSDGSFFLYSRLTVDKSRWQEGNVFSCSVMHEALHNHYTQKSLSLSLGK

SEQ ID NO: 1920 - protein, 326 aa, synthetic construct
  REGION 1..326: note = Description of Artificial Sequence: Synthetic polypeptide
ASTKGPSVFPLAPCSRSTSESTAALGCLVKDYFPEPVTVSWNSGALTSGVHTFPAVLQSSGLYSLSSVVTVPSSSLGTKTYTCNVDHKPSNTKVDKRVESKYGPPCPPCPAPPVAGPSVFLFPPKPKDTLMISRTPEVTCVVVDVSQEDPEVQFNWYVDGVEVHNAKTKPREEQFNSTYRVVSVLTVLHQDWLNGKEYKCKVSNKGLPSSIEKTISKAKGQPREPQVYTLPPSQEEMTKNQVSLTCLVKGFYPSDIAVEWESNGQPENNYKTTPPVLDSDGSFFLYSRLTVDKSRWQEGNVFSCSVMHEALHNRFTQKSLSLSLGK

SEQ ID NO: 1921 - protein, 232 aa, synthetic construct
  REGION 1..232: note = Description of Artificial Sequence: Synthetic polypeptide
EPKSCDKTHTCPPCPAPELLGGPSVFLFPPKPKDTLMISRTPEVTCVVVDVSHEDPEVKFNWYVDGVEVHNAKTKPREEQYNSTYRVVSVLTVLHQDWLNGKEYKCKVSNKALPAPIEKTISKAKGQPREPQVYTLPPSRDELTKNQVSLTCLVKGFYPSDIAVEWESNGQPENNYKTTPPVLDSDGSFFLYSKLTVDKSRWQQGNVFSCSVMHEALHNHYTQKSLSLSPGK

SEQ ID NO: 1922 - protein, 232 aa, synthetic construct
  REGION 1..232: note = Description of Artificial Sequence: Synthetic polypeptide
EPKSCDKTHTCPPCPAPELLGGPSVFLFPPKPKDTLMISRTPEVTCVVVDVSHEDPEVKFNWYVDGVEVHNAKTKPREEQYNSTYRVVSVLTVLHQDWLNGKEYKCKVSNKALPAPIEKTISKAKGQPREPQVYTLPPSRDELTKNQVSLTCLVKGFYPSDIAVEWESNGQPENNYKTTPPVLDSDGSFFLYSKLTVDKSRWQQGNVFSCSVMHEALHNRFTQKSLSLSPGK

SEQ ID NO: 1923 - protein, 228 aa, synthetic construct
  REGION 1..228: note = Description of Artificial Sequence: Synthetic polypeptide
ERKCCVECPPCPAPPVAGPSVFLFPPKPKDTLMISRTPEVTCVVVDVSHEDPEVQFNWYVDGVEVHNAKTKPREEQFNSTFRVVSVLTVVHQDWLNGKEYKCKVSNKGLPAPIEKTISKTKGQPREPQVYTLPPSREEMTKNQVSLTCLVKGFYPSDISVEWESNGQPENNYKTTPPMLDSDGSFFLYSKLTVDKSRWQQGNVFSCSVMHEALHNHYTQKSLSLSPGK

SEQ ID NO: 1924 - protein, 228 aa, synthetic construct
  REGION 1..228: note = Description of Artificial Sequence: Synthetic polypeptide
ERKCCVECPPCPAPPVAGPSVFLFPPKPKDTLMISRTPEVTCVVVDVSHEDPEVQFNWYVDGVEVHNAKTKPREEQFNSTFRVVSVLTVVHQDWLNGKEYKCKVSNKGLPAPIEKTISKTKGQPREPQVYTLPPSREEMTKNQVSLTCLVKGFYPSDISVEWESNGQPENNYKTTPPMLDSDGSFFLYSKLTVDKSRWQQGNVFSCSVMHEALHNRFTQKSLSLSPGK

SEQ ID NO: 1925 - protein, 229 aa, synthetic construct
  REGION 1..229: note = Description of Artificial Sequence: Synthetic polypeptide
ESKYGPPCPSCPAPEFLGGPSVFLFPPKPKDTLMISRTPEVTCVVVDVSQEDPEVQFNWYVDGVEVHNAKTKPREEQFNSTYRVVSVLTVLHQDWLNGKEYKCKVSNKGLPSSIEKTISKAKGQPREPQVYTLPPSQEEMTKNQVSLTCLVKGFYPSDIAVEWESNGQPENNYKTTPPVLDSDGSFFLYSRLTVDKSRWQEGNVFSCSVMHEALHNRFTQKSLSLSLGK

SEQ ID NO: 1926 - protein, 229 aa, synthetic construct
  REGION 1..229: note = Description of Artificial Sequence: Synthetic polypeptide
ESKYGPPCPSCPAPEFLGGPSVFLFPPKPKDTLMISRTPEVTCVVVDVSQEDPEVQFNWYVDGVEVHNAKTKPREEQFNSTYRVVSVLTVLHQDWLNGKEYKCKVSNKGLPSSIEKTISKAKGQPREPQVYTLPPSQEEMTKNQVSLTCLVKGFYPSDIAVEWESNGQPENNYKTTPPVLDSDGSFFLYSRLTVDKSRWQEGNVFSCSVMHEALHNHYTQKSLSLSLGK

SEQ ID NO: 1927 - protein, 231 aa, synthetic construct
  REGION 1..231: note = Description of Artificial Sequence: Synthetic polypeptide
EPKSCDKTHTCPPCPAPPVAGPSVFLFPPKPKDTLMISRTPEVTCVVVDVSQEDPEVQFNWYVDGVEVHNAKTKPREEQFNSTYRVVSVLTVLHQDWLNGKEYKCKVSNKGLPSSIEKTISKAKGQPREPQVYTLPPSRDELTKNQVSLTCLVKGFYPSDIAVEWESNGQPENNYKTTPPVLDSDGSFFLYSKLTVDKSRWQQGNVFSCSVMHEALHNHYTQKSLSLSPGK

SEQ ID NO: 1928 - protein, 231 aa, synthetic construct
  REGION 1..231: note = Description of Artificial Sequence: Synthetic polypeptide
EPKSCDKTHTCPPCPAPPVAGPSVFLFPPKPKDTLMISRTPEVTCVVVDVSQEDPEVQFNWYVDGVEVHNAKTKPREEQFNSTYRVVSVLTVLHQDWLNGKEYKCKVSNKGLPSSIEKTISKAKGQPREPQVYTLPPSRDELTKNQVSLTCLVKGFYPSDIAVEWESNGQPENNYKTTPPVLDSDGSFFLYSKLTVDKSRWQQGNVFSCSVMHEALHNRFTQKSLSLSPGK

SEQ ID NO: 1929 - protein, 228 aa, synthetic construct
  REGION 1..228: note = Description of Artificial Sequence: Synthetic polypeptide
ESKYGPPCPPCPAPPVAGPSVFLFPPKPKDTLMISRTPEVTCVVVDVSQEDPEVQFNWYVDGVEVHNAKTKPREEQFNSTYRVVSVLTVLHQDWLNGKEYKCKVSNKGLPSSIEKTISKAKGQPREPQVYTLPPSQEEMTKNQVSLTCLVKGFYPSDIAVEWESNGQPENNYKTTPPVLDSDGSFFLYSRLTVDKSRWQEGNVFSCSVMHEALHNHYTQKSLSLSLGK

SEQ ID NO: 1930 - protein, 228 aa, synthetic construct
  REGION 1..228: note = Description of Artificial Sequence: Synthetic polypeptide
ESKYGPPCPPCPAPPVAGPSVFLFPPKPKDTLMISRTPEVTCVVVDVSQEDPEVQFNWYVDGVEVHNAKTKPREEQFNSTYRVVSVLTVLHQDWLNGKEYKCKVSNKGLPSSIEKTISKAKGQPREPQVYTLPPSQEEMTKNQVSLTCLVKGFYPSDIAVEWESNGQPENNYKTTPPVLDSDGSFFLYSRLTVDKSRWQEGNVFSCSVMHEALHNRFTQKSLSLSLGK

SEQ ID NO: 1931 - protein, 227 aa, synthetic construct
  REGION 1..227: note = Description of Artificial Sequence: Synthetic polypeptide
DKTHTCPPCPAPELLGGPSVFLFPPKPKDTLMISRTPEVTCVVVDVSHEDPEVKFNWYVDGVEVHNAKTKPREEQYNSTYRVVSVLTVLHQDWLNGKEYKCKVSNKALPAPIEKTISKAKGQPREPQVYTLPPSRDELTKNQVSLTCLVKGFYPSDIAVEWESNGQPENNYKTTPPVLDSDGSFFLYSKLTVDKSRWQQGNVFSCSVMHEALHNRFTQKSLSLSPGK

SEQ ID NO: 1932 - protein, 227 aa, synthetic construct
  REGION 1..227: note = Description of Artificial Sequence: Synthetic polypeptide
DKTHTCPPCPAPELLGGPSVFLFPPKPKDTLMISRTPEVTCVVVDVSHEDPEVKFNWYVDGVEVHNAKTKPREEQYNSTYRVVSVLTVLHQDWLNGKEYKCKVSNKALPAPIEKTISKAKGQPREPQVYTLPPSRDELTKNQVSLTCLVKGFYPSDIAVEWESNGQPENNYKTTPPVLDSDGSFFLYSKLTVDKSRWQQGNVFSCSVMHEALHNHYTQKSLSLSPGK

SEQ ID NO: 1933 - protein, 233 aa, synthetic construct
  REGION 1..233: note = Description of Artificial Sequence: Synthetic polypeptide
EPRGPTIKPCPPCKCPAPNLLGGPSVFIFPPKIKDVLMISLSPIVTCVVVDVSEDDPDVQISWFVNNVEVHTAQTQTHREDYNSTLRVVSALPIQHQDWMSGKEFKCKVNNKDLPAPIERTISKPKGSVRAPQVYVLPPPEEEMTKKQVTLTCMVTDFMPEDIYVEWTNNGKTELNYKNTEPVLDSDGSYFMYSKLRVEKKNWVERNSYSCSVVHEGLHNRFTTKSFSRTPGK

SEQ ID NO: 1934 - protein, 233 aa, synthetic construct
  REGION 1..233: note = Description of Artificial Sequence: Synthetic polypeptide
EPRGPTIKPCPPCKCPAPNLLGGPSVFIFPPKIKDVLMISLSPIVTCVVVDVSEDDPDVQISWFVNNVEVHTAQTQTHREDYNSTLRVVSALPIQHQDWMSGKEFKCKVNNKDLPAPIERTISKPKGSVRAPQVYVLPPPEEEMTKKQVTLTCMVTDFMPEDIYVEWTNNGKTELNYKNTEPVLDSDGSYFMYSKLRVEKKNWVERNSYSCSVVHEGLHNHHTTKSFSRTPGK

SEQ ID NO: 1935 - skipped

SEQ ID NO: 1936 - protein, 5 aa, synthetic construct
  REGION 1..5: note = Description of Artificial Sequence: Synthetic peptide
LLQGG

SEQ ID NO: 1937 - protein, 4 aa, synthetic construct
  REGION 1..4: note = Description of Artificial Sequence: Synthetic peptide
LLQG

SEQ ID NO: 1938 - protein, 6 aa, synthetic construct
  REGION 1..6: note = Description of Artificial Sequence: Synthetic peptide
LSLSQG

SEQ ID NO: 1939 - protein, 8 aa, synthetic construct
  REGION 1..8: note = Description of Artificial Sequence: Synthetic peptide
GGGLLQGG

SEQ ID NO: 1940 - protein, 5 aa, synthetic construct
  REGION 1..5: note = Description of Artificial Sequence: Synthetic peptide
GLLQG

SEQ ID NO: 1941 - protein, 10 aa, synthetic construct
  REGION 1..10: note = Description of Artificial Sequence: Synthetic peptide
GSPLAQSHGG

SEQ ID NO: 1942 - protein, 7 aa, synthetic construct
  REGION 1..7: note = Description of Artificial Sequence: Synthetic peptide
GLLQGGG

SEQ ID NO: 1943 - protein, 6 aa, synthetic construct
  REGION 1..6: note = Description of Artificial Sequence: Synthetic peptide
GLLQGG

SEQ ID NO: 1944 - protein, 4 aa, synthetic construct
  REGION 1..4: note = Description of Artificial Sequence: Synthetic peptide
GLLQ

SEQ ID NO: 1945 - protein, 8 aa, synthetic construct
  REGION 1..8: note = Description of Artificial Sequence: Synthetic peptide
LLQLLQGA

SEQ ID NO: 1946 - protein, 5 aa, synthetic construct
  REGION 1..5: note = Description of Artificial Sequence: Synthetic peptide
LLQGA

SEQ ID NO: 1947 - protein, 7 aa, synthetic construct
  REGION 1..7: note = Description of Artificial Sequence: Synthetic peptide
LLQYQGA

SEQ ID NO: 1948 - protein, 6 aa, synthetic construct
  REGION 1..6: note = Description of Artificial Sequence: Synthetic peptide
LLQGSG

SEQ ID NO: 1949 - protein, 6 aa, synthetic construct
  REGION 1..6: note = Description of Artificial Sequence: Synthetic peptide
LLQYQG

SEQ ID NO: 1950 - protein, 7 aa, synthetic construct
  REGION 1..7: note = Description of Artificial Sequence: Synthetic peptide
LLQLLQG

SEQ ID NO: 1951 - protein, 5 aa, synthetic construct
  REGION 1..5: note = Description of Artificial Sequence: Synthetic peptide
SLLQG

SEQ ID NO: 1952 - protein, 5 aa, synthetic construct
  REGION 1..5: note = Description of Artificial Sequence: Synthetic peptide
LLQLQ

SEQ ID NO: 1953 - protein, 6 aa, synthetic construct
  REGION 1..6: note = Description of Artificial Sequence: Synthetic peptide
LLQLLQ

SEQ ID NO: 1954 - protein, 5 aa, synthetic construct
  REGION 1..5: note = Description of Artificial Sequence: Synthetic peptide
LLQGR

SEQ ID NO: 1955 - DNA, 372 bp, Homo sapiens
  source 1..372: mol_type = unassigned DNA
caggtgcagctgcaggagtcgggcccaggactggtgaagccttcggagaccctgtccctcacctgcactgtctctggtgactccatcagtagttactattggacctggatccggcagcccccagggaagggactggagtggattgggtatatcttttacagggggggcaccacctacaacccctccctcaagagtcgagtcaccatatcagtagacacgtccaagaaccagttctccctgaagttgaggtctgtgaccgccgcagacacggccgtgtattactgtgcgaggggagacgatcttttagtggtgacaagtgtctactggtacatcgatctctggggccgtggcaccctggtcaccgtctcctca

SEQ ID NO: 1956 - protein, 124 aa, Homo sapiens
QVQLQESGPGLVKPSETLSLTCTVSGDSISSYYWTWIRQPPGKGLEWIGYIFYRGGTTYNPSLKSRVTISVDTSKNQFSLKLRSVTAADTAVYYCARGDDLLVVTSVYWYIDLWGRGTLVTVSS

SEQ ID NO: 1957 - DNA, 24 bp, Homo sapiens
  source 1..24: mol_type = unassigned DNA
ggtgactccatcagtagttactat

SEQ ID NO: 1958 - protein, 8 aa, Homo sapiens
GDSISSYY

SEQ ID NO: 1959 - DNA, 21 bp, Homo sapiens
  source 1..21: mol_type = unassigned DNA
atcttttacagggggggcacc

SEQ ID NO: 1960 - protein, 7 aa, Homo sapiens
IFYRGGT

SEQ ID NO: 1961 - DNA, 54 bp, Homo sapiens
  source 1..54: mol_type = unassigned DNA
gcgaggggagacgatcttttagtggtgacaagtgtctactggtacatcgatctc

SEQ ID NO: 1962 - protein, 18 aa, Homo sapiens
ARGDDLLVVTSVYWYIDL

SEQ ID NO: 1963 - DNA, 360 bp, Homo sapiens
  source 1..360: mol_type = unassigned DNA
caggtgcagctggtggagtctgggggaggcgtggtccagcctggggggtccctgagactctcctgtgcagcgtccggattcaccttcagtggctatggcatgcactgggtccgccaggctccaggcaaggggctggagtggatggcagttatatggtatgatggaagtaatgattactatccagactccgtgaagggccgattcaccatctccagagacaattccaagaacacgctgtatctgcaaatgaacagcctgagagtcgaggacacggctgtgtattactgtgcgcgagatgcgtgggacctactacgttcctttgactactggggccagggaaccctggtcaccgtctcctca

SEQ ID NO: 1964 - protein, 120 aa, Homo sapiens
QVQLVESGGGVVQPGGSLRLSCAASGFTFSGYGMHWVRQAPGKGLEWMAVIWYDGSNDYYPDSVKGRFTISRDNSKNTLYLQMNSLRVEDTAVYYCARDAWDLLRSFDYWGQGTLVTVSS

SEQ ID NO: 1965 - DNA, 24 bp, Homo sapiens
  source 1..24: mol_type = unassigned DNA
ggattcaccttcagtggctatggc

SEQ ID NO: 1966 - protein, 8 aa, Homo sapiens
GFTFSGYG

SEQ ID NO: 1967 - DNA, 24 bp, Homo sapiens
  source 1..24: mol_type = unassigned DNA
atatggtatgatggaagtaatgat

SEQ ID NO: 1968 - protein, 8 aa, Homo sapiens
IWYDGSND

SEQ ID NO: 1969 - DNA, 39 bp, Homo sapiens
  source 1..39: mol_type = unassigned DNA
gcgcgagatgcgtgggacctactacgttcctttgactac

SEQ ID NO: 1970 - protein, 13 aa, Homo sapiens
ARDAWDLLRSFDY

SEQ ID NO: 1971 - DNA, 363 bp, Homo sapiens
  source 1..363: mol_type = unassigned DNA
caggtgcagctggtggagtctgggggaggcgtggtccagcctgggaggtccctgagagtctcttgtgtagtgtctggattcaccttcagcagctttggcatgcattgggtccgccaggctccagacaaggggctggagtgggtggcagttatatggtatgatggaagtaatgattactattcagactccgtgaagggccgattcaccatctccagagacaattccaagaacacgctgtttctacaaatgaaccgcctgagagccgaagacacggctgtttattactgtgcgcgagctaataactggaaccgttttgatgcctttgatctctggggccaagggacaatggtcaccgtctcttca

SEQ ID NO: 1972 - protein, 121 aa, Homo sapiens
QVQLVESGGGVVQPGRSLRVSCVVSGFTFSSFGMHWVRQAPDKGLEWVAVIWYDGSNDYYSDSVKGRFTISRDNSKNTLFLQMNRLRAEDTAVYYCARANNWNRFDAFDLWGQGTMVTVSS

SEQ ID NO: 1973 - DNA, 24 bp, Homo sapiens
  source 1..24: mol_type = unassigned DNA
ggattcaccttcagcagctttggc

SEQ ID NO: 1974 - protein, 8 aa, Homo sapiens
GFTFSSFG

SEQ ID NO: 1975 - DNA, 24 bp, Homo sapiens
  source 1..24: mol_type = unassigned DNA
atatggtatgatggaagtaatgat

SEQ ID NO: 1976 - protein, 8 aa, Homo sapiens
IWYDGSND

SEQ ID NO: 1977 - DNA, 42 bp, Homo sapiens
  source 1..42: mol_type = unassigned DNA
gcgcgagctaataactggaaccgttttgatgcctttgatctc

SEQ ID NO: 1978 - protein, 14 aa, Homo sapiens
ARANNWNRFDAFDL

SEQ ID NO: 1979 - DNA, 372 bp, Homo sapiens
  source 1..372: mol_type = unassigned DNA
gaggtgcagctggtggagtctgggggaggcttggttcagcctggagggtccctgagactctcctgtgcagcctctggattcatcttcagtaattatgaaatgaactgggtccgccaggctccagggaagggactggaatggatttcatacattactagtagtggtaatatgaaatattacgcagactctgtgaagggccgattcaccatctccagagacaacgacaagaattcactgtatctgcaaatgagtagtctgagagtcgaggacacggctgtttattattgtgtgagaggagggcgatttttggagtggttgacctactacgttatggtcgtctggggccaagggaccacggtcaccgtctcctca

SEQ ID NO: 1980 - protein, 124 aa, Homo sapiens
EVQLVESGGGLVQPGGSLRLSCAASGFIFSNYEMNWVRQAPGKGLEWISYITSSGNMKYYADSVKGRFTISRDNDKNSLYLQMSSLRVEDTAVYYCVRGGRFLEWLTYYVMVVWGQGTTVTVSS

SEQ ID NO: 1981 - DNA, 24 bp, Homo sapiens
  source 1..24: mol_type = unassigned DNA
ggattcatcttcagtaattatgaa

SEQ ID NO: 1982 - protein, 8 aa, Homo sapiens
GFIFSNYE

SEQ ID NO: 1983 - DNA, 24 bp, Homo sapiens
  source 1..24: mol_type = unassigned DNA
attactagtagtggtaatatgaaa

SEQ ID NO: 1984 - protein, 8 aa, Homo sapiens
ITSSGNMK

SEQ ID NO: 1985 - DNA, 51 bp, Homo sapiens
  source 1..51: mol_type = unassigned DNA
gtgagaggagggcgatttttggagtggttgacctactacgttatggtcgtc

SEQ ID NO: 1986 - protein, 17 aa, Homo sapiens
VRGGRFLEWLTYYVMVV

SEQ ID NO: 1987 - DNA, 360 bp, Homo sapiens
  source 1..360: mol_type = unassigned DNA
caggtgcagctggtggagtctgggggaggcgtggtccagcctgggaggtccctgagactctcctgtgcagtgtctggattcaccttcagtagctatggcatgcactgggtccgccaggctccaggcaaggggctggagtgggtggcaaatatttggtatgatggaactaatgattactatccatactccgtgaagggccgattcaccatctccagagacaattcccagaacacactatatctgcaaatgaacagcctgagagccgaggacacggctgtatattactgtgcgagagaggacttcattaactaccggtcttttgactattggggccagggaaccctggtcaccgtctcctca

SEQ ID NO: 1988 - protein, 120 aa, Homo sapiens
QVQLVESGGGVVQPGRSLRLSCAVSGFTFSSYGMHWVRQAPGKGLEWVANIWYDGTNDYYPYSVKGRFTISRDNSQNTLYLQMNSLRAEDTAVYYCAREDFINYRSFDYWGQGTLVTVSS

SEQ ID NO: 1989 - DNA, 24 bp, Homo sapiens
  source 1..24: mol_type = unassigned DNA
ggattcaccttcagtagctatggc

SEQ ID NO: 1990 - protein, 8 aa, Homo sapiens
GFTFSSYG

SEQ ID NO: 1991 - DNA, 24 bp, Homo sapiens
  source 1..24: mol_type = unassigned DNA
atttggtatgatggaactaatgat

SEQ ID NO: 1992 - protein, 8 aa, Homo sapiens
IWYDGTND

SEQ ID NO: 1993 - DNA, 39 bp, Homo sapiens
  source 1..39: mol_type = unassigned DNA
gcgagagaggacttcattaactaccggtcttttgactat

SEQ ID NO: 1994 - protein, 13 aa, Homo sapiens
AREDFINYRSFDY

SEQ ID NO: 1995 - DNA, 372 bp, Homo sapiens
  source 1..372: mol_type = unassigned DNA
caggtgcagctggtggagtctgggggaggcgtggtccagccagggacgtccctgagactctcctgtgtcgcgtctggattcaccttcagaaattttggaatgcactgggtccgccaggctccaggcaaggggctggagtgggtggcaaatatatggtttgacggaagtaatgagaactatgtcgagtccattcagggccgattcaccatctccagagacaattccaagaacacactgaatctgcagatgaacagcctgagagccgaggactcggctgtctattactgtgtgagagagggaatcctaggaactactaatccttatgatgcttttgatgtctggggccaagggacaatggtcaccgtctcttca

SEQ ID NO: 1996 - protein, 124 aa, Homo sapiens
QVQLVESGGGVVQPGTSLRLSCVASGFTFRNFGMHWVRQAPGKGLEWVANIWFDGSNENYVESIQGRFTISRDNSKNTLNLQMNSLRAEDSAVYYCVREGILGTTNPYDAFDVWGQGTMVTVSS

SEQ ID NO: 1997 - DNA, 24 bp, Homo sapiens
  source 1..24: mol_type = unassigned DNA
ggattcaccttcagaaattttgga

SEQ ID NO: 1998 - protein, 8 aa, Homo sapiens
GFTFRNFG

SEQ ID NO: 1999 - DNA, 24 bp, Homo sapiens
  source 1..24: mol_type = unassigned DNA
atatggtttgacggaagtaatgag

SEQ ID NO: 2000 - protein, 8 aa, Homo sapiens
IWFDGSNE

SEQ ID NO: 2001 - DNA, 51 bp, Homo sapiens
  source 1..51: mol_type = unassigned DNA
gtgagagagggaatcctaggaactactaatccttatgatgcttttgatgtc

SEQ ID NO: 2002 - protein, 17 aa, Homo sapiens
VREGILGTTNPYDAFDV

SEQ ID NO: 2003 - DNA, 378 bp, Homo sapiens
  source 1..378: mol_type = unassigned DNA
caggtgcagctggtggagtctgggggaggcgtggtccagcctgggaggtccctgagactctcctgtgcagcgtctggattcacctttagtaactttggaatgcactgggtccgccaggcgccaggcaagggactggagtgggtggcaggtatatggtttgatggaagtaataaaaactatatagactccgtgaagggccgattcaccatctcaagagacaattccaagaacacgctgtatctgcaaatgaacagcctgagagccgaggacacggctgtgtattactgtgcgagagagggctatgattcggggactgattatatcccctatgatatttttgatatttggggccaagggacaatggtcaccgtctcttca

SEQ ID NO: 2004 - protein, 126 aa, Homo sapiens
QVQLVESGGGVVQPGRSLRLSCAASGFTFSNFGMHWVRQAPGKGLEWVAGIWFDGSNKNYIDSVKGRFTISRDNSKNTLYLQMNSLRAEDTAVYYCAREGYDSGTDYIPYDIFDIWGQGTMVTVSS

SEQ ID NO: 2005 - DNA, 24 bp, Homo sapiens
  source 1..24: mol_type = unassigned DNA
ggattcacctttagtaactttgga

SEQ ID NO: 2006 - protein, 8 aa, Homo sapiens
GFTFSNFG

SEQ ID NO: 2007 - DNA, 24 bp, Homo sapiens
  source 1..24: mol_type = unassigned DNA
atatggtttgatggaagtaataaa

SEQ ID NO: 2008 - protein, 8 aa, Homo sapiens
IWFDGSNK

SEQ ID NO: 2009 - DNA, 57 bp, Homo sapiens
  source 1..57: mol_type = unassigned DNA
gcgagagagggctatgattcggggactgattatatcccctatgatatttttgatatt

SEQ ID NO: 2010 - protein, 19 aa, Homo sapiens
AREGYDSGTDYIPYDIFDI

SEQ ID NO: 2011 - DNA, 363 bp, Homo sapiens
  source 1..363: mol_type = unassigned DNA
gaagtgcagctggtggagtctgggggaggcttggtacagcctggcacgtccctgagactctcctgtgcagcctctggattcacctttgatgattatgccatgcactgggtccggcaagctccagggaagggcctggagtgggtctcaggtattacttggaatagttataacatagactatgctgactctgtgaagggccgattcaccatctccagagacaacgccaagaactccctgtatctgcaaatgaacagtctgagagctgaggacacggccttgtattactgtgcaaaagatgatgactacagtaactacgtttactttgactactggggccagggaaccctggtcaccgtctcctca

SEQ ID NO: 2012 - protein, 121 aa, Homo sapiens
EVQLVESGGGLVQPGTSLRLSCAASGFTFDDYAMHWVRQAPGKGLEWVSGITWNSYNIDYADSVKGRFTISRDNAKNSLYLQMNSLRAEDTALYYCAKDDDYSNYVYFDYWGQGTLVTVSS

SEQ ID NO: 2013 - DNA, 24 bp, Homo sapiens
  source 1..24: mol_type = unassigned DNA
ggattcacctttgatgattatgcc

SEQ ID NO: 2014 - protein, 8 aa, Homo sapiens
GFTFDDYA

SEQ ID NO: 2015 - DNA, 24 bp, Homo sapiens
  source 1..24: mol_type = unassigned DNA
attacttggaatagttataacata

SEQ ID NO: 2016 - protein, 8 aa, Homo sapiens
ITWNSYNI

SEQ ID NO: 2017 - DNA, 42 bp, Homo sapiens
  source 1..42: mol_type = unassigned DNA
gcaaaagatgatgactacagtaactacgtttactttgactac

SEQ ID NO: 2018 - protein, 14 aa, Homo sapiens
AKDDDYSNYVYFDY

SEQ ID NO: 2019 - DNA, 360 bp, Homo sapiens
  source 1..360: mol_type = unassigned DNA
caggttcagctggtgcagtccggaactgaggtgaaggagcctggggcctcagtgaaggtctcctgtaaggcctctggttactcctttaccacctatggtatcagctggctgcgacaggcccctggacaaggacttgagtggatgggatggatcagcacttacaatggtgacacaatctctgcacagatgctccaggacagagtcaccctgaccgcagacacatccacgcgcacagcctacatggaactgagaagcctgagatctgacgacacggccgtgtattactgtgcgagaggtcatgagtatgatagtcttgtttattcttactggggccagggaaccctggtcaccgtctcctca

SEQ ID NO: 2020 - protein, 120 aa, Homo sapiens
QVQLVQSGTEVKEPGASVKVSCKASGYSFTTYGISWLRQAPGQGLEWMGWISTYNGDTISAQMLQDRVTLTADTSTRTAYMELRSLRSDDTAVYYCARGHEYDSLVYSYWGQGTLVTVSS

SEQ ID NO: 2021 - DNA, 24 bp, Homo sapiens
  source 1..24: mol_type = unassigned DNA
ggttactcctttaccacctatggt

SEQ ID NO: 2022 - protein, 8 aa, Homo sapiens
GYSFTTYG

SEQ ID NO: 2023 - DNA, 24 bp, Homo sapiens
  source 1..24: mol_type = unassigned DNA
atcagcacttacaatggtgacaca

SEQ ID NO: 2024 - protein, 8 aa, Homo sapiens
ISTYNGDT

SEQ ID NO: 2025 - DNA, 39 bp, Homo sapiens
  source 1..39: mol_type = unassigned DNA
gcgagaggtcatgagtatgatagtcttgtttattcttac

SEQ ID NO: 2026 - protein, 13 aa, Homo sapiens
ARGHEYDSLVYSY

SEQ ID NO: 2027 - DNA, 360 bp, Homo sapiens
  source 1..360: mol_type = unassigned DNA
caggtgcagctggtggagtctgggggaggcgtggtccagcctgggaggtccctgagactctcctgtgcagcgtctggattcaccttcagtagttatgccatgcactgggtccgccaggctccaggcagggggctggagtgggtggcggttatatggcatgatggagatgttgaatactatgtagactccgtgaaggaccgattcaccatctccagagacaattccaagagcacgctgtatctgcaaatgaacagcctgagagccgaagatacggctttatattattgtgcgagagaggcgtgggacctactacgtccctttgactattggggccagggaaccctggtcaccgtctcctca

SEQ ID NO: 2028 - protein, 120 aa, Homo sapiens
QVQLVESGGGVVQPGRSLRLSCAASGFTFSSYAMHWVRQAPGRGLEWVAVIWHDGDVEYYVDSVKDRFTISRDNSKSTLYLQMNSLRAEDTALYYCAREAWDLLRPFDYWGQGTLVTVSS

SEQ ID NO: 2029 - DNA, 24 bp, Homo sapiens
  source 1..24: mol_type = unassigned DNA
ggattcaccttcagtagttatgcc

SEQ ID NO: 2030 - protein, 8 aa, Homo sapiens
GFTFSSYA

SEQ ID NO: 2031 - DNA, 24 bp, Homo sapiens
  source 1..24: mol_type = unassigned DNA
atatggcatgatggagatgttgaa

SEQ ID NO: 2032 - protein, 8 aa, Homo sapiens
IWHDGDVE

SEQ ID NO: 2033 - DNA, 39 bp, Homo sapiens
  source 1..39: mol_type = unassigned DNA
gcgagagaggcgtgggacctactacgtccctttgactat

SEQ ID NO: 2034 - protein, 13 aa, Homo sapiens
AREAWDLLRPFDY

SEQ ID NO: 2035 - DNA, 351 bp, Homo sapiens
  source 1..351: mol_type = unassigned DNA
gaggtgcagctggtggagtctggaggaggcttggtccagcctggggggtccctgagactctcctgtgcagcctctgggttcatcgtcaccaccaactacatgacctggctccgccaggctccagggaaggggctggagtgggtctcacttatttatagcagtggtcacacatactacgcagactccgtgaagggccgattcaccatctccagacacaattccaagaacacactgtatctacaaatggacagcctgagagctgaggacacggccgtgtattactgtgcgagtgctttcgcagcggatgtttttgatatctggggccaagggacaatggtcaccgtctcttca

SEQ ID NO: 2036 - protein, 117 aa, Homo sapiens
EVQLVESGGGLVQPGGSLRLSCAASGFIVTTNYMTWLRQAPGKGLEWVSLIYSSGHTYYADSVKGRFTISRHNSKNTLYLQMDSLRAEDTAVYYCASAFAADVFDIWGQGTMVTVSS

SEQ ID NO: 2037 - DNA, 24 bp, Homo sapiens
  source 1..24: mol_type = unassigned DNA
gggttcatcgtcaccaccaactac

SEQ ID NO: 2038 - protein, 8 aa, Homo sapiens
GFIVTTNY

SEQ ID NO: 2039 - DNA, 21 bp, Homo sapiens
  source 1..21: mol_type = unassigned DNA
atttatagcagtggtcacaca

SEQ ID NO: 2040 - protein, 7 aa, Homo sapiens
IYSSGHT

SEQ ID NO: 2041 - DNA, 33 bp, Homo sapiens
  source 1..33: mol_type = unassigned DNA
gcgagtgctttcgcagcggatgtttttgatatc

SEQ ID NO: 2042 - protein, 11 aa, Homo sapiens
ASAFAADVFDI

SEQ ID NO: 2043 - DNA, 372 bp, Homo sapiens
  source 1..372: mol_type = unassigned DNA
caggtgcagctggtggagtctgggggaggcgtggtccagcctgggaggtccctgagactctcctgttcagcgtctggattctccttcagtcactttggcatgcactgggtccgccaggttccaggcgggggcctggagtgggtgacaagtatatggtttgatggaagtaatagatattatgcagactccttgaagggccgattcaccatctccagagacaattccaagaatactctgtatctggaaatgaacagcctgagagccgaggacacggctgtgtattactgtgtgagagaggggatactgggaactactaatccttatgatgtttttgatgtctggggtcaggggacaatggtcaccgtctcttca

SEQ ID NO: 2044 - protein, 124 aa, Homo sapiens
QVQLVESGGGVVQPGRSLRLSCSASGFSFSHFGMHWVRQVPGGGLEWVTSIWFDGSNRYYADSLKGRFTISRDNSKNTLYLEMNSLRAEDTAVYYCVREGILGTTNPYDVFDVWGQGTMVTVSS

SEQ ID NO: 2045 - DNA, 24 bp, Homo sapiens
  source 1..24: mol_type = unassigned DNA
ggattctccttcagtcactttggc

SEQ ID NO: 2046 - protein, 8 aa, Homo sapiens
GFSFSHFG

SEQ ID NO: 2047 - DNA, 24 bp, Homo sapiens
  source 1..24: mol_type = unassigned DNA
atatggtttgatggaagtaataga

SEQ ID NO: 2048 - protein, 8 aa, Homo sapiens
IWFDGSNR

SEQ ID NO: 2049 - DNA, 51 bp, Homo sapiens
  source 1..51: mol_type = unassigned DNA
gtgagagaggggatactgggaactactaatccttatgatgtttttgatgtc

SEQ ID NO: 2050 - protein, 17 aa, Homo sapiens
VREGILGTTNPYDVFDV

SEQ ID NO: 2051 - DNA, 372 bp, Homo sapiens
  source 1..372: mol_type = unassigned DNA
gaggtgcagctggtggagtctgggggaggcttggtacagccgggggggtccctgagactctcctgtgcagcctctggattcacctttagaagctatgtcatgagctggttccgccaggctccagggaaggggctggagtgggtctcaggaatgagtgggagtggtggaagcacatcctacgcagactccgtgaagggccggttcaccatctccagagacaattcaaagaatacgctgtatctgctaatgaacagcctgagaaccgaggacacggccgtatattattgtgcgaaagaaaacggggctaactggaactacggctactacggtatggacgtctggggccaagggaccacggtcaccgtctcctca

SEQ ID NO: 2052 - protein, 124 aa, Homo sapiens
EVQLVESGGGLVQPGGSLRLSCAASGFTFRSYVMSWFRQAPGKGLEWVSGMSGSGGSTSYADSVKGRFTISRDNSKNTLYLLMNSLRTEDTAVYYCAKENGANWNYGYYGMDVWGQGTTVTVSS

SEQ ID NO: 2053 - DNA, 24 bp, Homo sapiens
  source 1..24: mol_type = unassigned DNA
ggattcacctttagaagctatgtc

SEQ ID NO: 2054 - protein, 8 aa, Homo sapiens
GFTFRSYV

SEQ ID NO: 2055 - DNA, 24 bp, Homo sapiens
  source 1..24: mol_type = unassigned DNA
atgagtgggagtggtggaagcaca

SEQ ID NO: 2056 - protein, 8 aa, Homo sapiens
MSGSGGST

SEQ ID NO: 2057 - DNA, 51 bp, Homo sapiens
  source 1..51: mol_type = unassigned DNA
gcgaaagaaaacggggctaactggaactacggctactacggtatggacgtc

SEQ ID NO: 2058 - protein, 17 aa, Homo sapiens
AKENGANWNYGYYGMDV

SEQ ID NO: 2059 - DNA, 360 bp, Homo sapiens
  source 1..360: mol_type = unassigned DNA
caggtgcagctggtggagtctgggggaggcgtggtccagcctgggaggtccctgagactctcctgtgtagcgtctggattctccttcagtaactttggcatgcactgggtccgccaggctccaggcaaggggctggagtgggtggcaattatatggtatgatggaagtaataaatactattcagactccgtgaagggccgcttcaccatctccagagacaattccaagaacacgctgtatctgcaaatgaacagcctgagagtcgacgacacggctgtgtattactgtgcgagattcgatcgctggaaatttgacgcttttgatatctggggccaagggacaatggtcaccgtctcttca

SEQ ID NO: 2060 - protein, 120 aa, Homo sapiens
QVQLVESGGGVVQPGRSLRLSCVASGFSFSNFGMHWVRQAPGKGLEWVAIIWYDGSNKYYSDSVKGRFTISRDNSKNTLYLQMNSLRVDDTAVYYCARFDRWKFDAFDIWGQGTMVTVSS

SEQ ID NO: 2061 - DNA, 24 bp, Homo sapiens
  source 1..24: mol_type = unassigned DNA
ggattctccttcagtaactttggc

SEQ ID NO: 2062 - protein, 8 aa, Homo sapiens
GFSFSNFG

SEQ ID NO: 2063 - DNA, 24 bp, Homo sapiens
  source 1..24: mol_type = unassigned DNA
atatggtatgatggaagtaataaa

SEQ ID NO: 2064 - protein, 8 aa, Homo sapiens
IWYDGSNK

SEQ ID NO: 2065 - DNA, 39 bp, Homo sapiens
  source 1..39: mol_type = unassigned DNA
gcgagattcgatcgctggaaatttgacgcttttgatatc

SEQ ID NO: 2066 - protein, 13 aa, Homo sapiens
ARFDRWKFDAFDI

SEQ ID NO: 2067 - DNA, 360 bp, Homo sapiens
  source 1..360: mol_type = unassigned DNA
caggtgcagctggtggagtctgggggaggcgtggtccagcctgggaggtccctgagactctcctgtgcagcgtctggattcaccttcagtagctttgccatgcactgggtccgccaggctccaggcaaggggctggagtgggtggcagttatatggtatgatggaagtaatgattactatgcagcctccgtgaagggccgtttcaccatctccagagacaattccaagaacacgctgtatctggaaatgaacagactgagagccgaggacacggctgtgtatcactgtgcgagagataactggaattactgggggggtatggacgtctggggccaagggaccacggtcaccgtctcctca

SEQ ID NO: 2068 - protein, 120 aa, Homo sapiens
QVQLVESGGGVVQPGRSLRLSCAASGFTFSSFAMHWVRQAPGKGLEWVAVIWYDGSNDYYAASVKGRFTISRDNSKNTLYLEMNRLRAEDTAVYHCARDNWNYWGGMDVWGQGTTVTVSS

SEQ ID NO: 2069 - DNA, 24 bp, Homo sapiens
  source 1..24: mol_type = unassigned DNA
ggattcaccttcagtagctttgcc

SEQ ID NO: 2070 - protein, 8 aa, Homo sapiens
GFTFSSFA

SEQ ID NO: 2071 - DNA, 24 bp, Homo sapiens
  source 1..24: mol_type = unassigned DNA
atatggtatgatggaagtaatgat

SEQ ID NO: 2072 - protein, 8 aa, Homo sapiens
IWYDGSND

SEQ ID NO: 2073 - DNA, 39 bp, Homo sapiens
  source 1..39: mol_type = unassigned DNA
gcgagagataactggaattactgggggggtatggacgtc

SEQ ID NO: 2074 - protein, 13 aa, Homo sapiens
ARDNWNYWGGMDV

SEQ ID NO: 2075 - DNA, 375 bp, Homo sapiens
  source 1..375: mol_type = unassigned DNA
gaggtgcagctgttggagtctgggggaggctgggtgcagccgggggggtccctgagactctcctgtgcagcctctggattcgcctttagtaattatgccatgaactgggtccgccagactccagggaaggggctggagtgggtctcagttattagtagtagtggtggaaacacatactacgcagactccgtgaagggccggttcgccatctccagagacaattccagggatacgctgcatctgcaaatgaacagactgagagtcgaggacacggccgtctattactgtgcgaaagaaatacgtccgtattacgatctttcctactattacggtatggacgtctggggccaagggaccacggtcaccgtctcctca

SEQ ID NO: 2076 - protein, 125 aa, Homo sapiens
EVQLLESGGGWVQPGGSLRLSCAASGFAFSNYAMNWVRQTPGKGLEWVSVISSSGGNTYYADSVKGRFAISRDNSRDTLHLQMNRLRVEDTAVYYCAKEIRPYYDLSYYYGMDVWGQGTTVTVSS

SEQ ID NO: 2077 - DNA, 24 bp, Homo sapiens
  source 1..24: mol_type = unassigned DNA
ggattcgcctttagtaattatgcc

SEQ ID NO: 2078 - protein, 8 aa, Homo sapiens
GFAFSNYA

SEQ ID NO: 2079 - DNA, 24 bp, Homo sapiens
  source 1..24: mol_type = unassigned DNA
attagtagtagtggtggaaacaca

SEQ ID NO: 2080 - protein, 8 aa, Homo sapiens
ISSSGGNT

SEQ ID NO: 2081 - DNA, 54 bp, Homo sapiens
  source 1..54: mol_type = unassigned DNA
gcgaaagaaatacgtccgtattacgatctttcctactattacggtatggacgtc

SEQ ID NO: 2082 - protein, 18 aa, Homo sapiens
AKEIRPYYDLSYYYGMDV

SEQ ID NO: 2083 - DNA, 348 bp, Homo sapiens
  source 1..348: mol_type = unassigned DNA
caggtgcagctgcaggagtcgggcccaggactggtgaagtcttcggagaccctgtccctcacctgcactgtctctggtggctccatcagaaatttctactggagctggctccggcagcccccagggaagggactagagtggattgggcacatcaattacaatgggggcaccgactacaacccctccctcaagagtcgagtcaccatatcagtagacacgtccaagaatcagttctccctgaatttgaactctgtgaccgccgcagacacggccgtgtattactgtgcgagacagagattctacggtatggacgtctggggtccagggaccacggtcaccgtctcctca

SEQ ID NO: 2084 - protein, 116 aa, Homo sapiens
QVQLQESGPGLVKSSETLSLTCTVSGGSIRNFYWSWLRQPPGKGLEWIGHINYNGGTDYNPSLKSRVTISVDTSKNQFSLNLNSVTAADTAVYYCARQRFYGMDVWGPGTTVTVSS

SEQ ID NO: 2085 - DNA, 24 bp, Homo sapiens
  source 1..24: mol_type = unassigned DNA
ggtggctccatcagaaatttctac

SEQ ID NO: 2086 - protein, 8 aa, Homo sapiens
GGSIRNFY

SEQ ID NO: 2087 - DNA, 21 bp, Homo sapiens
  source 1..21: mol_type = unassigned DNA
atcaattacaatgggggcacc

SEQ ID NO: 2088 - protein, 7 aa, Homo sapiens
INYNGGT

SEQ ID NO: 2089 - DNA, 30 bp, Homo sapiens
  source 1..30: mol_type = unassigned DNA
gcgagacagagattctacggtatggacgtc

SEQ ID NO: 2090 - protein, 10 aa, Homo sapiens
ARQRFYGMDV

SEQ ID NO: 2091 - DNA, 324 bp, Homo sapiens; identical to SEQ ID NO: 57
  source 1..324: mol_type = unassigned DNA

SEQ ID NO: 2092 - protein, 108 aa, Homo sapiens; identical to SEQ ID NO: 58

SEQ ID NO: 2093 - DNA, 18 bp, Homo sapiens
  source 1..18: mol_type = unassigned DNA
cagagcattagcagctat

SEQ ID NO: 2094 - protein, 6 aa, Homo sapiens
QSISSY

SEQ ID NO: 2095-2096 - skipped (2 entries)

SEQ ID NO: 2097 - DNA, 30 bp, Homo sapiens; identical to SEQ ID NO: 15
  source 1..30: mol_type = unassigned DNA

SEQ ID NO: 2098 - protein, 10 aa, Homo sapiens
QQSYSTPPIT

SEQ ID NO: 2099 - protein, 1408 aa, Homo sapiens
MKAPAVLAPGILVLLFTLVQRSNGECKEALAKSEMNVNMKYQLPNFTAETPIQNVILHEHHIFLGATNYIYVLNEEDLQKVAEYKTGPVLEHPDCFPCQDCSSKANLSGGVWKDNINMALVVDTYYDDQLISCGSVNRGTCQRHVFPHNHTADIQSEVHCIFSPQIEEPSQCPDCVVSALGAKVLSSVKDRFINFFVGNTINSSYFPDHPLHSISVRRLKETKDGFMFLTDQSYIDVLPEFRDSYPIKYVHAFESNNFIYFLTVQRETLDAQTFHTRIIRFCSINSGLHSYMEMPLECILTEKRKKRSTKKEVFNILQAAYVSKPGAQLARQIGASLNDDILFGVFAQSKPDSAEPMDRSAMCAFPIKYVNDFFNKIVNKNNVRCLQHFYGPNHEHCFNRTLLRNSSGCEARRDEYRTEFTTALQRVDLFMGQFSEVLLTSISTFIKGDLTIANLGTSEGRFMQVVVSRSGPSTPHVNFLLDSHPVSPEVIVEHTLNQNGYTLVITGKKITKIPLNGLGCRHFQSCSQCLSAPPFVQCGWCHDKCVRSEECLSGTWTQQICLPAIYKVFPNSAPLEGGTRLTICGWDFGFRRNNKFDLKKTRVLLGNESCTLTLSESTMNTLKCTVGPAMNKHFNMSIIISNGHGTTQYSTFSYVDPVITSISPKYGPMAGGTLLTLTGNYLNSGNSRHISIGGKTCTLKSVSNSILECYTPAQTISTEFAVKLKIDLANRETSIFSYREDPIVYEIHPTKSFISTWWKEPLNIVSFLFCFASGGSTITGVGKNLNSVSVPRMVINVHEAGRNFTVACQHRSNSEIICCTTPSLQQLNLQLPLKTKAFFMLDGILSKYFDLIYVHNPVFKPFEKPVMISMGNENVLEIKGNDIDPEAVKGEVLKVGNKSCENIHLHSEAVLCTVPNDLLKLNSELNIEWKQAISSTVLGKVIVQPDQNFTGLIAGVVSISTALLLLLGFFLWLKKRKQIKDLGSELVRYDARVHTPHLDRLVSARSVSPTTEMVSNESVDYRATFPEDQFPNSSQNGSCRQVQYPLTDMSPILTSGDSDISSPLLQNTVHIDLSALNPELVQAVQHVVIGPSSLIVHFNEVIGRGHFGCVYHGTLLDNDGKKIHCAVKSLNRITDIGEVSQFLTEGIIMKDFSHPNVLSLLGICLRSEGSPLVVLPYMKHGDLRNFIRNETHNPTVKDLIGFGLQVAKGMKYLASKKFVHRDLAARNCMLDEKFTVKVADFGLARDMYDKEYYSVHNKTGAKLPVKWMALESLQTQKFTTKSDVWSFGVLLWELMTRGAPPYPDVNTFDITVYLLQGRRLLQPEYCPDPLYEVMLKCWHPKAEMRPSFSELVSRISAIFSTFIGEHYVHVNATYVNVKCVAPYPSLLSSEDNADDEVDTRPASFWETS

SEQ ID NO: 2100 - protein, 1390 aa, Homo sapiens
MKAPAVLAPGILVLLFTLVQRSNGECKEALAKSEMNVNMKYQLPNFTAETPIQNVILHEHHIFLGATNYIYVLNEEDLQKVAEYKTGPVLEHPDCFPCQDCSSKANLSGGVWKDNINMALVVDTYYDDQLISCGSVNRGTCQRHVFPHNHTADIQSEVHCIFSPQIEEPSQCPDCVVSALGAKVLSSVKDRFINFFVGNTINSSYFPDHPLHSISVRRLKETKDGFMFLTDQSYIDVLPEFRDSYPIKYVHAFESNNFIYFLTVQRETLDAQTFHTRIIRFCSINSGLHSYMEMPLECILTEKRKKRSTKKEVFNILQAAYVSKPGAQLARQIGASLNDDILFGVFAQSKPDSAEPMDRSAMCAFPIKYVNDFFNKIVNKNNVRCLQHFYGPNHEHCFNRTLLRNSSGCEARRDEYRTEFTTALQRVDLFMGQFSEVLLTSISTFIKGDLTIANLGTSEGRFMQVVVSRSGPSTPHVNFLLDSHPVSPEVIVEHTLNQNGYTLVITGKKITKIPLNGLGCRHFQSCSQCLSAPPFVQCGWCHDKCVRSEECLSGTWTQQICLPAIYKVFPNSAPLEGGTRLTICGWDFGFRRNNKFDLKKTRVLLGNESCTLTLSESTMNTLKCTVGPAMNKHFNMSIIISNGHGTTQYSTFSYVDPVITSISPKYGPMAGGTLLTLTGNYLNSGNSRHISIGGKTCTLKSVSNSILECYTPAQTISTEFAVKLKIDLANRETSIFSYREDPIVYEIHPTKSFISGGSTITGVGKNLNSVSVPRMVINVHEAGRNFTVACQHRSNSEIICCTTPSLQQLNLQLPLKTKAFFMLDGILSKYFDLIYVHNPVFKPFEKPVMISMGNENVLEIKGNDIDPEAVKGEVLKVGNKSCENIHLHSEAVLCTVPNDLLKLNSELNIEWKQAISSTVLGKVIVQPDQNFTGLIAGVVSISTALLLLLGFFLWLKKRKQIKDLGSELVRYDARVHTPHLDRLVSARSVSPTTEMVSNESVDYRATFPEDQFPNSSQNGSCRQVQYPLTDMSPILTSGDSDISSPLLQNTVHIDLSALNPELVQAVQHVVIGPSSLIVHFNEVIGRGHFGCVYHGTLLDNDGKKIHCAVKSLNRITDIGEVSQFLTEGIIMKDFSHPNVLSLLGICLRSEGSPLVVLPYMKHGDLRNFIRNETHNPTVKDLIGFGLQVAKGMKYLASKKFVHRDLAARNCMLDEKFTVKVADFGLARDMYDKEYYSVHNKTGAKLPVKWMALESLQTQKFTTKSDVWSFGVLLWELMTRGAPPYPDVNTFDITVYLLQGRRLLQPEYCPDPLYEVMLKCWHPKAEMRPSFSELVSRISAIFSTFIGEHYVHVNATYVNVKCVAPYPSLLSSEDNADDEVDTRPASFWETS

SEQ ID NO: 2101 - protein, 934 aa, Homo sapiens
MKAPAVLAPGILVLLFTLVQRSNGECKEALAKSEMNVNMKYQLPNFTAETPIQNVILHEHHIFLGATNYIYVLNEEDLQKVAEYKTGPVLEHPDCFPCQDCSSKANLSGGVWKDNINMALVVDTYYDDQLISCGSVNRGTCQRHVFPHNHTADIQSEVHCIFSPQIEEPSQCPDCVVSALGAKVLSSVKDRFINFFVGNTINSSYFPDHPLHSISVRRLKETKDGFMFLTDQSYIDVLPEFRDSYPIKYVHAFESNNFIYFLTVQRETLDAQTFHTRIIRFCSINSGLHSYMEMPLECILTEKRKKRSTKKEVFNILQAAYVSKPGAQLARQIGASLNDDILFGVFAQSKPDSAEPMDRSAMCAFPIKYVNDFFNKIVNKNNVRCLQHFYGPNHEHCFNRTLLRNSSGCEARRDEYRTEFTTALQRVDLFMGQFSEVLLTSISTFIKGDLTIANLGTSEGRFMQVVVSRSGPSTPHVNFLLDSHPVSPEVIVEHTLNQNGYTLVITGKKITKIPLNGLGCRHFQSCSQCLSAPPFVQCGWCHDKCVRSEECLSGTWTQQICLPAIYKVFPNSAPLEGGTRLTICGWDFGFRRNNKFDLKKTRVLLGNESCTLTLSESTMNTLKCTVGPAMNKHFNMSIIISNGHGTTQYSTFSYVDPVITSISPKYGPMAGGTLLTLTGNYLNSGNSRHISIGGKTCTLKSVSNSILECYTPAQTISTEFAVKLKIDLANRETSIFSYREDPIVYEIHPTKSFISGGSTITGVGKNLNSVSVPRMVINVHEAGRNFTVACQHRSNSEIICCTTPSLQQLNLQLPLKTKAFFMLDGILSKYFDLIYVHNPVFKPFEKPVMISMGNENVLEIKGNDIDPEAVKGEVLKVGNKSCENIHLHSEAVLCTVPNDLLKLNSELNIEVGFLHSSHDVNKEASVIMLFSGLK

SEQ ID NO: 2102 - protein, 281 aa, Homo sapiens
KEALAKSEMNVNMKYQLPNFTAETPIQNVILHEHHIFLGATNYIYVLNEEDLQKVAEYKTGPVLEHPDCFPCQDCSSKANLSGGVWKDNINMALVVDTYYDDQLISCGSVNRGTCQRHVFPHNHTADIQSEVHCIFSPQIEEPSQCPDCVVSALGAKVLSSVKDRFINFFVGNTINSSYFPDHPLHSISVRRLKETKDGFMFLTDQSYIDVLPEFRDSYPIKYVHAFESNNFIYFLTVQRETLDAQTFHTRIIRFCSINSGLHSYMEMPLECILTEKRKKR

SEQ ID NO: 2103 - protein, 1101 aa, Homo sapiens
STKKEVFNILQAAYVSKPGAQLARQIGASLNDDILFGVFAQSKPDSAEPMDRSAMCAFPIKYVNDFFNKIVNKNNVRCLQHFYGPNHEHCFNRTLLRNSSGCEARRDEYRTEFTTALQRVDLFMGQFSEVLLTSISTFIKGDLTIANLGTSEGRFMQVVVSRSGPSTPHVNFLLDSHPVSPEVIVEHTLNQNGYTLVITGKKITKIPLNGLGCRHFQSCSQCLSAPPFVQCGWCHDKCVRSEECLSGTWTQQICLPAIYKVFPNSAPLEGGTRLTICGWDFGFRRNNKFDLKKTRVLLGNESCTLTLSESTMNTLKCTVGPAMNKHFNMSIIISNGHGTTQYSTFSYVDPVITSISPKYGPMAGGTLLTLTGNYLNSGNSRHISIGGKTCTLKSVSNSILECYTPAQTISTEFAVKLKIDLANRETSIFSYREDPIVYEIHPTKSFISTWWKEPLNIVSFLFCFASGGSTITGVGKNLNSVSVPRMVINVHEAGRNFTVACQHRSNSEIICCTTPSLQQLNLQLPLKTKAFFMLDGILSKYFDLIYVHNPVFKPFEKPVMISMGNENVLEIKGNDIDPEAVKGEVLKVGNKSCENIHLHSEAVLCTVPNDLLKLNSELNIEWKQAISSTVLGKVIVQPDQNFTGLIAGVVSISTALLLLLGFFLWLKKRKQIKDLGSELVRYDARVHTPHLDRLVSARSVSPTTEMVSNESVDYRATFPEDQFPNSSQNGSCRQVQYPLTDMSPILTSGDSDISSPLLQNTVHIDLSALNPELVQAVQHVVIGPSSLIVHFNEVIGRGHFGCVYHGTLLDNDGKKIHCAVKSLNRITDIGEVSQFLTEGIIMKDFSHPNVLSLLGICLRSEGSPLVVLPYMKHGDLRNFIRNETHNPTVKDLIGFGLQVAKGMKYLASKKFVHRDLAARNCMLDEKFTVKVADFGLARDMYDKEYYSVHNKTGAKLPVKWMALESLQTQKFTTKSDVWSFGVLLWELMTRGAPPYPDVNTFDITVYLLQGRRLLQPEYCPDPLYEVMLKCWHPKAEMRPSFSELVSRISAIFSTFIGEHYVHVNATYVNVKCVAPYPSLLSSEDNADDEVDTRPASFWETS

SEQ ID NO: 2104 - protein, 1082 aa, Homo sapiens
TKKEVFNILQAAYVSKPGAQLARQIGASLNDDILFGVFAQSKPDSAEPMDRSAMCAFPIKYVNDFFNKIVNKNNVRCLQHFYGPNHEHCFNRTLLRNSSGCEARRDEYRTEFTTALQRVDLFMGQFSEVLLTSISTFIKGDLTIANLGTSEGRFMQVVVSRSGPSTPHVNFLLDSHPVSPEVIVEHTLNQNGYTLVITGKKITKIPLNGLGCRHFQSCSQCLSAPPFVQCGWCHDKCVRSEECLSGTWTQQICLPAIYKVFPNSAPLEGGTRLTICGWDFGFRRNNKFDLKKTRVLLGNESCTLTLSESTMNTLKCTVGPAMNKHFNMSIIISNGHGTTQYSTFSYVDPVITSISPKYGPMAGGTLLTLTGNYLNSGNSRHISIGGKTCTLKSVSNSILECYTPAQTISTEFAVKLKIDLANRETSIFSYREDPIVYEIHPTKSFISGGSTITGVGKNLNSVSVPRMVINVHEAGRNFTVACQHRSNSEIICCTTPSLQQLNLQLPLKTKAFFMLDGILSKYFDLIYVHNPVFKPFEKPVMISMGNENVLEIKGNDIDPEAVKGEVLKVGNKSCENIHLHSEAVLCTVPNDLLKLNSELNIEWKQAISSTVLGKVIVQPDQNFTGLIAGVVSISTALLLLLGFFLWLKKRKQIKDLGSELVRYDARVHTPHLDRLVSARSVSPTTEMVSNESVDYRATFPEDQFPNSSQNGSCRQVQYPLTDMSPILTSGDSDISSPLLQNTVHIDLSALNPELVQAVQHVVIGPSSLIVHFNEVIGRGHFGCVYHGTLLDNDGKKIHCAVKSLNRITDIGEVSQFLTEGIIMKDFSHPNVLSLLGICLRSEGSPLVVLPYMKHGDLRNFIRNETHNPTVKDLIGFGLQVAKGMKYLASKKFVHRDLAARNCMLDEKFTVKVADFGLARDMYDKEYYSVHNKTGAKLPVKWMALESLQTQKFTTKSDVWSFGVLLWELMTRGAPPYPDVNTFDITVYLLQGRRLLQPEYCPDPLYEVMLKCWHPKAEMRPSFSELVSRISAIFSTFIGEHYVHVNATYVNVKCVAPYPSLLSSEDNADDEVDTRPASFWETS

SEQ ID NO: 2105 - protein, 626 aa, Homo sapiens
TKKEVFNILQAAYVSKPGAQLARQIGASLNDDILFGVFAQSKPDSAEPMDRSAMCAFPIKYVNDFFNKIVNKNNVRCLQHFYGPNHEHCFNRTLLRNSSGCEARRDEYRTEFTTALQRVDLFMGQFSEVLLTSISTFIKGDLTIANLGTSEGRFMQVVVSRSGPSTPHVNFLLDSHPVSPEVIVEHTLNQNGYTLVITGKKITKIPLNGLGCRHFQSCSQCLSAPPFVQCGWCHDKCVRSEECLSGTWTQQICLPAIYKVFPNSAPLEGGTRLTICGWDFGFRRNNKFDLKKTRVLLGNESCTLTLSESTMNTLKCTVGPAMNKHFNMSIIISNGHGTTQYSTFSYVDPVITSISPKYGPMAGGTLLTLTGNYLNSGNSRHISIGGKTCTLKSVSNSILECYTPAQTISTEFAVKLKIDLANRETSIFSYREDPIVYEIHPTKSFISGGSTITGVGKNLNSVSVPRMVINVHEAGRNFTVACQHRSNSEIICCTTPSLQQLNLQLPLKTKAFFMLDGILSKYFDLIYVHNPVFKPFEKPVMISMGNENVLEIKGNDIDPEAVKGEVLKVGNKSCENIHLHSEAVLCTVPNDLLKLNSELNIEVGFLHSSHDVNKEASVIMLFSGLK

SEQ ID NO: 2106 - protein, 650 aa, synthetic construct
  REGION 1..650: note = Description of Artificial Sequence: Synthetic polypeptide
TKKEVFNILQAAYVSKPGAQLARQIGASLNDDILFGVFAQSKPDSAEPMDRSAMCAFPIKYVNDFFNKIVNKNNVRCLQHFYGPNHEHCFNRTLLRNSSGCEARRDEYRTEFTTALQRVDLFMGQFSEVLLTSISTFIKGDLTIANLGTSEGRFMQVVVSRSGPSTPHVNFLLDSHPVSPEVIVEHTLNQNGYTLVITGKKITKIPLNGLGCRHFQSCSQCLSAPPFVQCGWCHDKCVRSEECLSGTWTQQICLPAIYKVFPNSAPLEGGTRLTICGWDFGFRRNNKFDLKKTRVLLGNESCTLTLSESTMNTLKCTVGPAMNKHFNMSIIISNGHGTTQYSTFSYVDPVITSISPKYGPMAGGTLLTLTGNYLNSGNSRHISIGGKTCTLKSVSNSILECYTPAQTISTEFAVKLKIDLANRETSIFSYREDPIVYEIHPTKSFISTWWKEPLNIVSFLFCFASGGSTITGVGKNLNSVSVPRMVINVHEAGRNFTVACQHRSNSEIICCTTPSLQQLNLQLPLKTKAFFMLDGILSKYFDLIYVHNPVFKPFEKPVMISMGNENVLEIKGNDIDPEAVKGEVLKVGNKSCENIHLHSEAVLCTVPNDLLKLNSELNIEWKQAEQKLISEEDLEQKLISEEDLHHHHHH

SEQ ID NO: 2107 - protein, 838 aa, synthetic construct
  REGION 1..838: note = Description of Artificial Sequence: Synthetic polypeptide
TKKEVFNILQAAYVSKPGAQLARQIGASLNDDILFGVFAQSKPDSAEPMDRSAMCAFPIKYVNDFFNKIVNKNNVRCLQHFYGPNHEHCFNRTLLRNSSGCEARRDEYRTEFTTALQRVDLFMGQFSEVLLTSISTFIKGDLTIANLGTSEGRFMQVVVSRSGPSTPHVNFLLDSHPVSPEVIVEHTLNQNGYTLVITGKKITKIPLNGLGCRHFQSCSQCLSAPPFVQCGWCHDKCVRSEECLSGTWTQQICLPAIYKVFPNSAPLEGGTRLTICGWDFGFRRNNKFDLKKTRVLLGNESCTLTLSESTMNTLKCTVGPAMNKHFNMSIIISNGHGTTQYSTFSYVDPVITSISPKYGPMAGGTLLTLTGNYLNSGNSRHISIGGKTCTLKSVSNSILECYTPAQTISTEFAVKLKIDLANRETSIFSYREDPIVYEIHPTKSFISTWWKEPLNIVSFLFCFASGGSTITGVGKNLNSVSVPRMVINVHEAGRNFTVACQHRSNSEIICCTTPSLQQLNLQLPLKTKAFFMLDGILSKYFDLIYVHNPVFKPFEKPVMISMGNENVLEIKGNDIDPEAVKGEVLKVGNKSCENIHLHSEAVLCTVPNDLLKLNSELNIEWKQAMEVSSVFIFPPKPKDVLTITLTPKVTCVVVDISKDDPEVQFSWFVDDVEVHTAQTQPREEQFNSTFRSVSELPIMHQDWLNGKEFKCRVNSAAFPAPIEKTISKTKGRPKAPQVYTIPPPKEQMAKDKVSLTCMITDFFPEDITVEWQWNGQPAENYKNTQPIMDTDGSYFVYSKLNVQKSNWEAGNTFTCSVLHEGLHNHHTEKSLSHSPGKE

SEQ ID NO: 2108 - protein, 1100 aa, synthetic construct
  REGION 1..1100: note = Description of Artificial Sequence: Synthetic polypeptide
STKKEVFNILQAAYVSKPGAQLARQIGASLNDDILFGVFAQSKPDSAEPMDRSAMCAFPIKYVNDFFNKIVNKNNVRCLQHFYGPNHEHCFNRTLLRNSSGCEARRDEYRAEFTTALQRVDLFMGQFSEVLLTSISTFVKGDLTIANLGTSEGRFMQVVVSRSGPSTPHVNFLLDSHPVSPEVIVEHPLNQNGYTLVVTGKKITKIPLNGLGCRHFQSCSQCLSAPPFVQCGWCHDKCVRSEECPSGTWTQQICLPAIYKVFPTSAPLEGGTRLTICGWDFGFRRNNKFDLKKTRVLLGNESCTLTLSESTMNTLKCTVGPAMNKHFNMSIIISNGHGTTQYSTFSYVDPIITSISPKYGPMAGGTLLTLTGNYLNSGNSRHISIGGKTCTLKSVSNSILECYTPAQTISTEFAVKLKIDLANRETSIFSYREDPIVYEIHPTKSFISGGSTITGVGKNLHSVSVPRMVINVHEAGRNFTVACQHRSNSEIICCTTPSLQQLNLQLPLKTKAFFMLDGILSKYFDLIYVHNPVFKPFEKPVMISMGNENVLEIKGNDIDPEAVKGEVLKVGNKSCENIHLHSEAVLCTVPNDLLKLNSELNIEWKQAISSTVLGKVIVQPDQNFTGLIAGVVSISIALLLLLGLFLWLKKRKQIKDLGSELVRYDARVHTPHLDRLVSARSVSPTTEMVSNESVDYRATFPEDQFPNSSQNGSCRQVQYPLTDMSPILTSGDSDISSPLLQNTVHIDLSALNPELVQAVQHVVIGPSSLIVHFNEVIGRGHFGCVYHGTLLDNDGKKIHCAVKSLNRITDIGEVSQFLTEGIIMKDFSHPNVLSLLGICLRSEGSPLVVLPYMKHGDLRNFIRNETHNPTVKDLIGFGLQVAKGMKYLASKKFVHRDLAARNCMLDEKFTVKVADFGLARDMYDKEYYSVHNKTGAKLPVKWMALESLQTQKFTTKSDVWSFGVLLWELMTRGAPPYPDVNTFDITVYLLQGRRLLQPEYCPDPLYEVMLKCWHPKAEMRPSFSELVSRISAIFSTFIGEHYVHVNATYVNVKCVAPYPSLLSSEDNADDEVDTEQKLISEEDLEQKLISEEDLHHHHHH

SEQ ID NO: 2109 - protein, 936 aa, Homo sapiens
ECKEALAKSEMNVNMKYQLPNFTAETPIQNVILHEHHIFLGATNYIYVLNEEDLQKVAEYKTGPVLEHPDCFPCQDCSSKANLSGGVWKDNINMALVVDTYYDDQLISCGSVNRGTCQRHVFPHNHTADIQSEVHCIFSPQIEEPSQCPDCVVSALGAKVLSSVKDRFINFFVGNTINSSYFPDHPLHSISVRRLKETKDGFMFLTDQSYIDVLPEFRDSYPIKYVHAFESNNFIYFLTVQRETLDAQTFHTRIIRFCSINSGLHSYMEMPLECILTEKRKKRSTKKEVFNILQAAYVSKPGAQLARQIGASLNDDILFGVFAQSKPDSAEPMDRSAMCAFPIKYVNDFFNKIVNKNNVRCLQHFYGPNHEHCFNRTLLRNSSGCEARRDEYRTEFTTALQRVDLFMGQFSEVLLTSISTFIKGDLTIANLGTSEGRFMQVVVSRSGPSTPHVNFLLDSHPVSPEVIVEHTLNQNGYTLVITGKKITKIPLNGLGCRHFQSCSQCLSAPPFVQCGWCHDKCVRSEECLSGTWTQQICLPAIYKVFPNSAPLEGGTRLTICGWDFGFRRNNKFDLKKTRVLLGNESCTLTLSESTMNTLKCTVGPAMNKHFNMSIIISNGHGTTQYSTFSYVDPVITSISPKYGPMAGGTLLTLTGNYLNSGNSRHISIGGKTCTLKSVSNSILECYTPAQTISTEFAVKLKIDLANRETSIFSYREDPIVYEIHPTKSFISGGSTITGVGKNLNSVSVPRMVINVHEAGRNFTVACQHRSNSEIICCTTPSLQQLNLQLPLKTKAFFMLDGILSKYFDLIYVHNPVFKPFEKPVMISMGNENVLEIKGNDIDPEAVKGEVLKVGNKSCENIHLHSEAVLCTVPNDLLKLNSELNIEWKQAISSTVLGKVIVQPDQNFTEQKLISEEDLGGEQKLISEEDLHHHHHH

SEQ ID NO: 2110 - protein, 13 aa, Homo sapiens
VRRLKETKDGFMF

SEQ ID NO: 2111 - protein, 11 aa, Homo sapiens
LARQIGASLND

SEQ ID NO: 2112 - protein, 35 aa, Homo sapiens
FIKGDLTIANLGTSEGRFMQVVVSRSGPSTPHVNF

SEQ ID NO: 2113 - protein, 4 aa, synthetic construct
  REGION 1..4: note = Description of Artificial Sequence: Synthetic peptide
GGGG

SEQ ID NO: 2114 - protein, 4 aa, synthetic construct
  REGION 1..4: note = Description of Artificial Sequence: Synthetic peptide
GGFG

SEQ ID NO: 2115 - protein, 4 aa, synthetic construct
GGFG

SEQ ID NO: 2116 - protein, 4 aa, synthetic construct
GGFG

SEQ ID NO: 2117 - protein, 4 aa, synthetic construct
GGFG

SEQ ID NO: 2118 - protein, 4 aa, synthetic construct
GGFG

SEQ ID NO: 2119 - protein, 4 aa, synthetic construct
GGFG

SEQ ID NO: 2120 - protein, 4 aa, synthetic construct
GGFG

SEQ ID NO: 2121 - protein, 4 aa, synthetic construct
GGFG

SEQ ID NO: 2122 - protein, 4 aa, synthetic construct
GGFG

SEQ ID NO: 2123 - protein, 4 aa, synthetic construct
GGFG

SEQ ID NO: 2124 - protein, 4 aa, synthetic construct
GGFG

SEQ ID NO: 2125 - protein, 4 aa, synthetic construct
GGFG

SEQ ID NO: 2126 - protein, 4 aa, synthetic construct
GGFG

SEQ ID NO: 2127 - protein, 4 aa, synthetic construct
GGFG

SEQ ID NO: 2128 - protein, 4 aa, synthetic construct
GGFG

SEQ ID NO: 2129 - protein, 4 aa, synthetic construct
GGFG

SEQ ID NO: 2130 - protein, 4 aa, synthetic construct
GGFG

SEQ ID NO: 2131 - protein, 4 aa, synthetic construct
GGFG

SEQ ID NO: 2132 - protein, 4 aa, synthetic construct
GGFG

SEQ ID NO: 2133 - protein, 4 aa, synthetic construct
GGFG

SEQ ID NO: 2134 - protein, 4 aa, synthetic construct
GGFG

SEQ ID NO: 2135 - protein, 4 aa, synthetic construct
GGFG

SEQ ID NO: 2136 - protein, 4 aa, synthetic construct
GGFG

SEQ ID NO: 2137 - protein, 4 aa, synthetic construct
GGFG

SEQ ID NO: 2138 - protein, 4 aa, synthetic construct
GGFG

SEQ ID NO: 2139 - protein, 4 aa, synthetic construct
GGFG

SEQ ID NO: 2140 - protein, 4 aa, synthetic construct
GGFG

SEQ ID NO: 2141 - protein, 4 aa, synthetic construct
GGFG

SEQ ID NO: 2142 - protein, 4 aa, synthetic construct
GGFG
